(19) United States
(12) Patent Application Publication
(10) Pub. No.: US 2022/0098593 A1
(43) Pub. Date: Mar. 31, 2022

(54) SPLICE ACCEPTOR SITE DISRUPTION OF A DISEASE-ASSOCIATED GENE USING ADENOSINE DEAMINASE BASE EDITORS, INCLUDING FOR THE TREATMENT OF GENETIC DISEASE

(71) Applicant: BEAM THERAPEUTICS INC., Cambridge, MA (US)

(72) Inventors: Nicole GAUDELLI, Cambridge, MA (US); Michael PACKER, Cambridge, MA (US); Ian SLAYMAKER, Cambridge, MA (US); Yi YU, Cambridge, MA (US); Bernd ZETSCHE, Cambridge, MA (US); Jason Michael GEHRKE, Cambridge, MA (US); Angelica MESSANA, Cambridge, MA (US); David A. BORN, Cambridge, MA (US); Seung-Joo LEE, Cambridge, MA (US)

(73) Assignee: BEAM THERAPEUTICS INC., Cambridge, MA (US)

(21) Appl. No.: 17/430,289

(22) PCT Filed: Feb. 13, 2020
(86) PCT No.: PCT/US2020/018107

§ 371 Date: Aug. 11, 2021

Related U.S. Application Data
(60) Provisional application No. 62/805,271, filed on Feb. 13, 2019.
(60) Provisional application No. 62/852,224, filed on May 23, 2019.
(60) Provisional application No. 62/852,228, filed on May 23, 2019.
(60) Provisional application No. 62/931,722, filed on Nov. 6, 2019.
(60) Provisional application No. 62/941,569, filed on Nov. 27, 2019.
(60) Provisional application No. 62/966,526, filed on Jan. 27, 2020.
(60) Provisional application No. 62/873,140, filed on Jul. 11, 2019.
(60) Provisional application No. 62/873,144, filed on Jul. 11, 2019.

(51) Int. Cl. C12N 15/113; C12N 15/10; C12N 9/02; C12N 9/22; C12N 9/78

(52) U.S. Cl. CPC C12N 15/1137; C12N 15/102; C12N 9/0089; C12Y 305/04004; C12N 9/78; C12Y 115/01001; C12N 9/22

(57) ABSTRACT

The invention features compositions and methods for treating, reducing, or ameliorating the debilitating effects of Amyotrophic Lateral Sclerosis (ALS) and spinal and bulbar muscular atrophy (SBMA). Provided herein are compositions and methods of using improved new base editors (e.g., adenosine base editors) comprising a polynucleotide programmable nucleotide binding domain and a nucleobase editing domain in conjunction with a guide polynucleotide to disrupt normal transcription of a gene associated with a genetic disease or condition, e.g. ALS, or SBMA by modifying a target gene associated with the genetic disorder or condition with a base editor system provided herein.

### CROSS-REFERENCE TO RELATED APPLICATIONS

[0001] This application claims the benefit of U.S. Provisional Application No. 62/805,271 filed on Feb. 13, 2019; U.S. Provisional Application No. 62/852,228 filed on May 23, 2019; U.S. Provisional Application No. 62/852,224 filed on May 23, 2019; U.S. Provisional Application No. 62/873,140 filed on Jul. 11, 2019; U.S. Provisional Application No. 62/873,144 filed on Jul. 11, 2019; U.S. Provisional Application 62/931,722 filed Nov. 6, 2019; U.S. Provisional Application 62/941,569 filed Nov. 27, 2019; U.S. Provisional Application No. 62/966,526 filed on Jan. 27, 2020, the disclosures of which are hereby incorporated by reference in their entirety.

### INCORPORATION BY REFERENCE

[0002] All publications, patents, and patent applications mentioned in this specification are herein incorporated by reference to the same extent as if each individual publication, patent, or patent application was specifically and individually indicated to be incorporated by reference. Absent any indication otherwise, publications, patents, and patent applications mentioned in this specification are incorporated herein by reference in their entireties.

### BACKGROUND OF THE DISCLOSURE

[0003] Targeted editing of nucleic acid sequences, for example, the targeted cleavage or the targeted modification of genomic DNA is a highly promising approach for the study of gene function and also has the potential to provide new therapies for human genetic diseases. Currently available base editors include cytidine base editors (e.g., BE4) that convert target C⋅G base pairs to T⋅A and adenine base editors (e.g., ABE7.10) that convert A⋅T to G⋅C. There is a need in the art for improved base editors capable of inducing modifications within a target sequence with greater specificity and efficiency.

### SUMMARY OF THE DISCLOSURE

[0004] The invention provides compositions comprising novel adenine base editors (e.g., ABE8) that have increased efficiency and methods of using base editors comprising adenosine deaminase variants for editing a target sequence.

[0005] In some aspects, provided herein, is a method of treating a neurological disorder in a subject in need thereof, the method comprising: administering to the subject (i) an adenosine base editor or a nucleic acid sequence encoding the adenosine base editor and (ii) a guide polynucleotide or a nucleic acid sequence encoding the guide polynucleotide, wherein the adenosine base editor comprises a programmable DNA binding domain and an adenosine deaminase domain, and wherein the guide polynucleotide directs the adenosine base editor to effect a single nucleobase modification at a splice site of a target gene associated with the neurological disorder in the subject, thereby treating the neurological disorder in the subject.

[0006] In some embodiments, the adenosine deaminase comprises an amino acid substitution at amino acid position 82 or 166 as numbered in SEQ ID NO: 2 or a corresponding substitution thereof. In some embodiments, the single nucleobase modification results in alternative splicing of a transcript encoded by the target gene. In some embodiments, the alternative splicing generates a truncated or nonfunctional protein encoded by the target gene. In some embodiments, the single nucleobase modification results in reduced expression of the target gene in the subject. In some embodiments, the target gene is a superoxide dismutase 1 (SOD1) gene and wherein the neurological disease is Amyotrophic Lateral Sclerosis (ALS). In some embodiments, the target gene is an androgen receptor (AR) gene and wherein the neurological disease is spinal and bulbar muscular atrophy (SBMA).

[0007] In some aspects, provided herein, is a method of treating Amyotrophic Lateral Sclerosis (ALS) in a subject in need thereof, the method comprising: administering to the subject (i) a base editor or a nucleic acid sequence encoding the base editor and (ii) a guide polynucleotide or a nucleic acid sequence encoding the guide polynucleotide, wherein the base editor comprises a programmable DNA binding domain and a deaminase domain, and wherein the guide polynucleotide directs the adenosine base editor to effect a single nucleobase modification at a splice site of a superoxide dismutase 1 (SOD1) gene in the subject, thereby treating ALS in the subject.

[0008] In some aspects, provided herein, is a method of treating Amyotrophic Lateral Sclerosis (ALS) in a subject in need thereof, the method comprising: administering to the subject (i) a base editor or a nucleic acid sequence encoding the base editor and (ii) a guide polynucleotide or a nucleic acid sequence encoding the guide polynucleotide, wherein the base editor comprises a programmable DNA binding domain and a deaminase domain, wherein the guide polynucleotide directs the adenosine base editor to effect a single nucleobase modification in a superoxide dismutase 1 (SOD1) gene in the subject and wherein the single nucleobase modification results in a premature stop codon in the SOD1 gene, thereby treating ALS in the subject.

[0009] In some embodiments, the deaminase is an adenosine deaminase comprising an amino acid substitution at amino acid position 82 or 166 as numbered in SEQ ID NO: 2 or a corresponding substitution thereof. In some embodiments, the single nucleobase modification is an A-to-G modification. In some embodiments, the single nucleobase modification is at a splice acceptor site of the SOD1 gene. In some embodiments, the splice site is a splice acceptor site 5′ of an exon of the SOD1 gene. In some embodiments, the exon of the SOD1 gene is exon 3 corresponding to SEQ ID NO: 3, or a variant thereof. In some embodiments, the exon 3 of the SOD1 gene is adjacent to the splice acceptor AG at nucleotide position 6828 of the SOD1 polynucleotide sequence as numbered in SEQ ID NO: 3, or a variant thereof. In some embodiments, the exon of the SOD1 gene is exon 4 corresponding to SEQ ID NO: 3, or a variant thereof. In some embodiments, the single nucleobase modification generates a transcription product lacking exons 3-5 of the human SOD1 gene corresponding to SEQ ID NO: 3, or a variant thereof. In some embodiments, expression of the SOD1 gene is reduced by at least 40% in the subject after the administration.

[0010] In some embodiments, guide polynucleotide comprises a nucleic acid sequence complementary to a splice acceptor nucleic acid sequence or a splice donor nucleic acid sequence of the SOD1 gene. In some embodiments, the guide polynucleotide comprises any one of the nucleic acid sequences selected from Table 19 or Table 23. In some embodiments, the guide polynucleotide comprises a nucleic acid sequence selected from the group consisting of 5′-UUAAAGGAAAGUAAUGGACCAGU-3′, 5′-UAAAUAGGCUGUACCAGUGCAGG-3′, 5′-UUCAUUAUUAGGCAUGUUGGAGA-3′, 5′-AAAUAGGCUGUACCAGUGCAGGU-3′, 5′-UAUUAGGCAUGUUGGAGACUUGG-3′, and a complementary sequence thereof.

[0011] In some aspects, provided herein, is a method of treating spinal and bulbar muscular atrophy (SBMA) in a subject, the method comprising: administering to the subject (i) a base editor or a nucleic acid sequence encoding the base editor and (ii) a guide polynucleotide or a nucleic acid sequence encoding the guide polynucleotide, wherein the base editor comprises a programmable DNA binding domain and a deaminase domain, and wherein the guide polynucleotide directs the adenosine base editor to effect a single nucleobase modification at a splice site of an androgen receptor (AR) gene in the subject, thereby treating SBMA in the subject.

[0012] In some aspects, provided herein, is a method of treating spinal and bulbar muscular atrophy (SBMA) in a subject, the method comprising: administering to the subject (i) a base editor or a nucleic acid sequence encoding the base editor and (ii) a guide polynucleotide or a nucleic acid sequence encoding the guide polynucleotide, wherein the adenosine base editor comprises a programmable DNA binding domain and a deaminase domain, and wherein the guide polynucleotide directs the adenosine base editor to effect a single nucleobase modification in an androgen receptor (AR) gene in the subject and wherein the single nucleobase modification results in a premature stop codon in the AR gene, thereby treating SBMA in the subject.

[0013] In some embodiments, the nucleobase modification results in a CAG-TAG codon change in the AR gene. In some embodiments, the codon change is in exon 1 or exon 2 in the AR gene. In some embodiments, the deaminase is an adenosine deaminase comprising an amino acid substitution at amino acid position 82 or 166 as numbered in SEQ ID NO: 2. In some embodiments, the single nucleobase modification is an A-to-G modification. In some embodiments, the A-to-G nucleobase modification is at a splice acceptor site of the AR gene. In some embodiments, the splice site is a splice acceptor site 5′ of an exon of the AR gene. In some embodiments, the exon of the AR gene is exon 2 corresponding to SEQ ID NO: 4, or a variant thereof. In some embodiments, the splice site is a splice donor site 3′ of an exon of the AR gene. In some embodiments, the exon of the AR gene is exon 1 corresponding to SEQ ID NO: 4, or a variant thereof. In some embodiments, the expression of the AR gene is reduced by at least 40% in the subject after the administration.

[0014] In some embodiments, guide polynucleotide comprises a nucleic acid sequence complementary to a splice acceptor nucleic acid sequence or a splice donor nucleic acid sequence of the AR gene. In some embodiments, the guide polynucleotide comprises a nucleic acid sequence selected from Table 41A or 41B. In some embodiments, the guide polynucleotide comprises a nucleic acid sequence selected from the group consisting of 5′-ACUUACCGCAUGUCCCCGUAAGG-3′, 5′-AGUGCAGUUAGGGCUGGGAAGGG-3′, 5′-AAGUGCAGUUAGGGCUGGGAAGG-3′ and a complement thereof.

[0015] In some embodiments, the subject is a mammal or a human. In some embodiments, the administering is performed through delivery to a cell of the central nervous system (CNS) of the subject. In some embodiments, the cell is a motor neuron.

[0016] In some aspects, provided herein, is a method of modifying a target gene or a regulatory element thereof associated with a neurological disorder, the method comprising: contacting the target gene or regulatory element thereof with (i) an adenosine base editor or a nucleic acid sequence encoding the adenosine base editor and (ii) a guide polynucleotide or a nucleic acid sequence encoding the guide polynucleotide, wherein the adenosine base editor comprises a programmable DNA binding domain and an adenosine deaminase domain, wherein the guide polynucleotide directs the adenosine base editor to effect a single nucleobase alteration at a splice site of the target gene.

[0017] In some embodiments, the adenosine deaminase comprises an amino acid substitution at amino acid position 82 or 166 as numbered in SEQ ID NO: 2. In some embodiments, the single nucleobase alteration results in alternative splicing of a transcript encoded by the target gene, a truncated and/or nonfunctional protein encoded by the target gene, and/or reduced expression of the target gene when expressed in a cell. In some embodiments, the target gene is a superoxide dismutase 1 (SOD1) gene and wherein the neurological disease is Amyotrophic Lateral Sclerosis (ALS). In some embodiments, the target gene is an androgen receptor (AR) gene and wherein the neurological disease is spinal and bulbar muscular atrophy (SBMA).

[0018] In some aspects, provided herein, is a method of modulating expression of a superoxide dismutase (SOD1) gene, the method comprising: contacting a SOD1 gene or a regulatory element thereof with (i) a base editor or a nucleic acid sequence encoding the base editor and (ii) a guide polynucleotide or a nucleic acid sequence encoding the guide polynucleotide, wherein the base editor comprises a programmable DNA binding domain and a deaminase domain, and wherein the guide polynucleotide directs the adenosine base editor to effect a single nucleobase alteration at a splice site of a superoxide dismutase 1 (SOD1) gene.

[0019] In some aspects, provided herein, is a method of modifying a superoxide dismutase (SOD1) gene, the method comprising: contacting the SOD1 gene or a regulatory element thereof with (i) a base editor or a nucleic acid sequence encoding the base editor and (ii) a guide polynucleotide or a nucleic acid sequence encoding the guide polynucleotide, wherein the guide polynucleotide directs the adenosine base editor to effect a single nucleobase alteration in a superoxide dismutase 1 (SOD1) gene in the subject and wherein the single nucleobase alteration results in a premature stop codon in the SOD1 gene.

[0020] In some embodiments, the single nucleobase alteration is an A-to-G alteration. In some embodiments, the nucleobase alteration is at a splice acceptor site of the SOD1 gene. In some embodiments, the splice site is a splice acceptor site 5′ of an exon of the SOD1 gene. In some embodiments, the exon of the SOD1 gene is exon 3 corresponding to SEQ ID NO: 3, or a variant thereof. In some embodiments, the exon 3 of the SOD1 gene is adjacent to the splice acceptor at nucleotide position 6828 of the SOD1 polynucleotide sequence as numbered in SEQ ID NO: 3, or a variant thereof. In some embodiments, the exon of the SOD1 gene is exon 4 corresponding to SEQ ID NO: 3, or a variant thereof. In some embodiments, the single nucleobase alteration generates a transcription product lacking exons 3-5 of the SOD1 gene corresponding to SEQ ID NO: 3, or a variant thereof.

[0021] In some embodiments, guide polynucleotide comprises a nucleic acid sequence complementary to a splice acceptor nucleic acid sequence or a splice donor nucleic acid sequence of the SOD1 gene. In some embodiments, the guide polynucleotide comprises a nucleic acid sequence selected from Table 19 or Table 23. In some embodiments, the guide polynucleotide comprises a nucleic acid sequence selected form the group consisting of 5′-UUAAAGGAAAGUAAUGGACCAGU-3′, 5′-UAAAUAGGCUGUACCAGUGCAGG-3′, 5′-UUCAUUAUUAGGCAUGUUGGAGA-3′, 5′-AAAUAGGCUGUACCAGUGCAGGU-3′, 5′-UAUUAGGCAUGUUGGAGACUUGG-3′.

[0022] In some aspects, provided herein, is a method of modulating expression of an androgen receptor (AR) gene, the method comprising: contacting the AR gene or a regulatory element thereof with (i) a base editor or a nucleic acid sequence encoding the base editor and (ii) a guide polynucleotide or a nucleic acid sequence encoding the guide polynucleotide, wherein the base editor comprises a programmable DNA binding domain and a deaminase domain, and wherein the guide polynucleotide directs the adenosine base editor to effect a single nucleobase alteration at a splice site of an androgen receptor (AR) gene.

[0023] In some aspects, provided herein, is a method of modifying an androgen receptor (AR) gene, the method comprising: contacting the AR gene or a regulatory element thereof with (i) a base editor or a nucleic acid sequence encoding the base editor and (ii) a guide polynucleotide or a nucleic acid sequence encoding the guide polynucleotide, wherein the base editor comprises a programmable DNA binding domain and a deaminase domain, and wherein the guide polynucleotide directs the adenosine base editor to effect a single nucleobase alteration in an androgen receptor (AR) gene in the subject and wherein the single nucleobase alteration results in a premature stop codon in the AR gene.

[0024] In some embodiments, the deaminase is an adenosine deaminase comprising an amino acid substitution at amino acid position 82 or 166 as numbered in SEQ ID NO: 2. In some embodiments, the deaminase is a cytidine deaminase. In some embodiments, the single nucleobase alteration is a C-to-T alteration. In some embodiments, the nucleobase alteration results in a CAG-TAG codon change in the AR gene. In some embodiments, the codon change is in exon 1 or exon 2 in the AR gene. In some embodiments, the single nucleobase alteration is an A-to-G alteration. In some embodiments, the A-to-G nucleobase alteration is at a splice acceptor site of the AR gene.

[0025] In some embodiments, the splice site is a splice acceptor site 5′ of an exon of the AR gene. In some embodiments, the exon of the AR gene is exon 2 corresponding to SEQ ID NO: 4, or a variant thereof. In some embodiments, the splice site is a splice donor site 3′ of an exon of the AR gene. In some embodiments, the exon of the AR gene is exon 1 corresponding to SEQ ID NO: 4, or a variant thereof.

[0026] In some embodiments, the guide polynucleotide comprises a nucleic acid sequence selected from Table 41A or 41B. In some embodiments, guide polynucleotide comprises a nucleic acid sequence complementary to a splice acceptor nucleic acid sequence or a splice donor nucleic acid sequence of the AR gene. In some embodiments, the guide polynucleotide comprises a nucleic acid sequence selected from Table 41A or 41B. In some embodiments, the guide polynucleotide comprises a nucleic acid sequence selected from the group consisting of 5′-ACUUACCGCAUGUCCCCGUAAGG-3′, 5′-AGUGCAGUUAGGGCUGGGAAGGG-3′, 5′-AAGUGCAGUUAGGGCUGGGAAGG-3′ and a complement thereof.

[0027] In some embodiments, the contacting is in a cell. In some embodiments, the single nucleobase modification results in less than 15% indels in a genome of the cell. In some embodiments, the single nucleobase modification results in less than 5% indels in a genome of the cell. In some embodiments, the single nucleobase modification results in less than 2% indels in a genome of the cell. In some embodiments, the cell is a mammalian cell or a human cell. In some embodiments, the cell is a central nervous system cell. In some embodiments, the cell is a motor neuron.

[0028] In some embodiments, the contacting is in a population of cells. In some embodiments, at least 40% of the population of cells comprise the single nucleobase modification after the contacting.

[0029] In some embodiments, at least 50% of the population of cells comprise the single nucleobase modification after the contacting. In some embodiments, at least 60% of the population of cells comprise the single nucleobase modification after the contacting. In some embodiments, at least 85% of the population of cells are viable after the contacting. In some embodiments, the population of cells are mammalian cells or human cells. In some embodiments, the population of cells are central nervous system cells. In some embodiments, the population of cells are motor neurons.

[0030] In some embodiments, the adenosine deaminase comprises a TadA deaminase. In some embodiments, the adenosine deaminase is TadA7.10. In some embodiments, the adenosine deaminase is a TadA comprising comprises a V28S mutation or a T166R mutation as numbered in SEQ ID NO: 2 or a corresponding mutation thereof.

[0031] In various aspects and embodiments provided herein, the adenosine deaminase comprises one or more of the following mutations: Y147T, Y147R, Q154S, Y123H, and Q154R as numbered in SEQ ID NO: 2 or a corresponding mutation thereof. In various aspects and embodiments provided herein, the adenosine deaminase comprises a combination of mutations selected from the group consisting of: Y147T+Q154R; Y147T+Q154S; Y147R+Q154S; V82S+Q154S; V82S+Y147R; V82S+Q154R; V82S+Y123H; I76Y+V82S; V82S+Y123H+Y147T; V82S+Y123H+Y147R; V82S+Y123H+Q154R; Y147R+Q154R+Y123H; Y147R+Q154R+176Y; Y147R+Q154R+T166R; Y123H+Y147R+Q154R+I76Y; V82S+Y123H+Y147R+Q154R; and I76Y+V82S+Y123H+Y147R+Q154R as numbered in SEQ ID NO: 2 or corresponding mutations thereof.

[0032] In some embodiments, the adenosine deaminase comprises a deletion of the C terminus beginning at a residue selected from the group consisting of 149, 150, 151, 152, 153, 154, 155, 156, and 157. In some embodiments, the adenosine deaminase comprises a TadA dimer. In some embodiments, the adenosine deaminase comprises an adenosine deaminase monomer.

[0033] In various aspects and embodiments above, the polynucleotide programmable DNA binding domain is a Cas9 domain. In some embodiments, the Cas9 domain is a Cas9 nickase domain. In some embodiments, the Cas9 domain comprises a SpCas9 domain. In some embodiments, the SpCas9 domain comprises a D10A and/or a H840A amino acid substitution as numbered in SEQ ID NO: 1 or corresponding amino acid substitutions thereof. In some embodiments, the Cas9 domain comprises a SaCas9 domain. In some embodiments, the Cas9 domain has specificity for an altered PAM. In some embodiments, the Cas9 domain has specificity for a PAM sequence selected from the group consisting of NGG, NGA, NGCG, NGN, NNGRRT, NNNRRT, NGCG, NGCN, NGTN, and NGC, wherein N is A, G, C, or T and wherein R is A or G.

[0034] In some aspects, provided herein, is a population of cells produced by the method described herein.

[0035] In some aspects, provided herein, is a base editor system that comprises (i) a base editor or a nucleic acid sequence encoding the base editor and (ii) a guide polynucleotide or a nucleic acid sequence encoding the guide polynucleotide, wherein the base editor comprises a programmable DNA binding domain and a deaminase domain, and wherein the guide polynucleotide directs the adenosine base editor to effect a single nucleobase modification at a splice site of a superoxide dismutase 1 (SOD1).

[0036] In some aspects, provided herein, is a base editor system that comprises (i) a base editor or a nucleic acid sequence encoding the base editor and (ii) a guide polynucleotide or a nucleic acid sequence encoding the guide polynucleotide, wherein the base editor comprises a programmable DNA binding domain and a deaminase domain, wherein the guide polynucleotide directs the adenosine base editor to effect a single nucleobase modification in a superoxide dismutase 1 (SOD1) gene and wherein the single nucleobase modification results in a premature stop codon in the SOD1 gene.

[0037] In some embodiments, the deaminase is an adenosine deaminase comprising an amino acid substitution at amino acid position 82 or 166 as numbered in SEQ ID NO: 2. In some embodiments, the deaminase is a cytidine deaminase. In some embodiments, the single nucleobase modification is an A-to-G modification. In some embodiments, the A-to-G nucleobase modification is at a splice acceptor site of the SOD1 gene. In some embodiments, the splice site is a splice acceptor site 5′ of an exon of the SOD1 gene. In some embodiments, the exon of the SOD1 gene is exon 3 corresponding to SEQ ID NO: 3, or a variant thereof. In some embodiments, the exon 3 of the SOD1 gene is adjacent to the splice acceptor AG at nucleotide position 6828 of the SOD1 polynucleotide sequence as numbered in SEQ ID NO: 3, or a variant thereof. In some embodiments, the alternative splicing of the SOD1 transcript generates a transcription product lacking exons 3-5 of the SOD1 gene corresponding to SEQ ID NO: 3, or a variant thereof. In some embodiments, the exon of the SOD1 gene is exon 4 corresponding to SEQ ID NO: 3, or a variant thereof.

[0038] In some embodiments, guide polynucleotide comprises a nucleic acid sequence complementary to a splice acceptor nucleic acid sequence or a splice donor nucleic acid sequence of the SOD1 gene. In some embodiments, the guide polynucleotide comprises a nucleic acid sequence selected from Table 19 or Table 23. In some embodiments, the guide polynucleotide comprises a nucleic acid sequence selected form the group consisting of 5′-UUAAAGGAAAGUAAUGGACCAGU-3′, 5′-UAAAUAGGCUGUACCAGUGCAGG-3′, 5′-UUCAUUAUUAGGCAUGUUGGAGA-3′, 5′-AAAUAGGCUGUACCAGUGCAGGU-3′, 5′-UAUUAGGCAUGUUGGAGACUUGG-3′, and a complementary sequence thereof.

[0039] In some aspects, provided herein, is a base editor system that comprises (i) a base editor or a nucleic acid sequence encoding the base editor and (ii) a guide polynucleotide or a nucleic acid sequence encoding the guide polynucleotide, wherein the base editor comprises a programmable DNA binding domain and a deaminase domain, and wherein the guide polynucleotide directs the adenosine base editor to effect a single nucleobase modification at a splice site of an androgen receptor (AR) gene.

[0040] In some aspects, provided herein, is a base editor system that comprises (i) a base editor or a nucleic acid sequence encoding the base editor and (ii) a guide polynucleotide or a nucleic acid sequence encoding the guide polynucleotide, wherein the adenosine base editor comprises a programmable DNA binding domain and a deaminase domain, and wherein the guide polynucleotide directs the adenosine base editor to effect a single nucleobase modification in an androgen receptor (AR) gene in the subject and wherein the single nucleobase modification results in a premature stop codon in the AR gene.

[0041] In some embodiments, the deaminase is an adenosine deaminase comprising an amino acid substitution at amino acid position 82 or 166 as numbered in SEQ ID NO: 2. In some embodiments, the deaminase is a cytidine deaminase. In some embodiments, the single nucleobase modification is a C-to-T modification. In some embodiments, the single nucleobase modification results in a CAG-TAG codon change in the AR gene. In some embodiments, the codon change is in exon 1 or exon 2 in the AR gene corresponding to SEQ ID NO: 4, or a variant thereof. In some embodiments, the single nucleobase modification is an A-to-G modification. In some embodiments, the A-to-G nucleobase modification is at a splice acceptor site of the AR gene. In some embodiments, the splice site is a splice acceptor site 5′ of an exon of the AR gene. In some embodiments, the exon of the AR gene is exon 2 corresponding to SEQ ID NO: 4, or a variant thereof. In some embodiments, the splice site is a splice donor site 3′ of an exon of the AR gene. In some embodiments, the exon of the AR gene is exon 1 corresponding to SEQ ID NO: 4, or a variant thereof.

[0042] In some embodiments, guide polynucleotide comprises a nucleic acid sequence complementary to a splice acceptor nucleic acid sequence or a splice donor nucleic acid sequence of the AR gene. In some embodiments, the guide polynucleotide comprises a nucleic acid sequence selected from Table 41A or 41B. In some embodiments, the guide polynucleotide comprises a nucleic acid sequence selected from the group consisting of 5′-ACUUACCGCAUGUCCCCGUAAGG-3′, 5′-AGUGCAGUUAGGGCUGGGAAGGG-3′, 5′-AAGUGCAGUUAGGGCUGGGAAGG-3′ and a complement thereof.

[0043] In some embodiments, the adenosine deaminase comprises a TadA deaminase. In some embodiments, the adenosine deaminase is TadA7.10. In some embodiments, the adenosine deaminase is a TadA comprising comprises a V28S mutation or a T166R mutation as numbered in SEQ ID NO: 2 or a corresponding mutation thereof. In some embodiments, the adenosine deaminase comprises one or more of the following mutations: Y147T, Y147R, Q154S, Y123H, and Q154R as numbered in SEQ ID NO: 2 or a corresponding mutation thereof. In some embodiments, the adenosine deaminase comprises a combination of mutations selected from the group consisting of: Y147T+Q154R; Y147T+Q154S; Y147R+Q154S; V82S+Q154S; V82S+Y147R; V82S+Q154R; V82S+Y123H; I76Y+V82S; V82S+Y123H+Y147T; V82S+Y123H+Y147R; V82S+Y123H+Q154R; Y147R+Q154R+Y123H; Y147R+Q154R+176Y; Y147R+Q154R+T166R; Y123H+Y147R+Q154R+I76Y; V82S+Y123H+Y147R+Q154R; and I76Y+V82S+Y123H+Y147R+Q154R as numbered in SEQ ID NO: 2 or corresponding mutations thereof.

[0044] In some embodiments, the adenosine deaminase comprises a deletion of the C terminus beginning at a residue selected from the group consisting of 149, 150, 151, 152, 153, 154, 155, 156, and 157. In some embodiments, the adenosine deaminase comprises a TadA dimer. In some embodiments, the adenosine deaminase comprises an adenosine deaminase monomer.

[0045] In some embodiments, the polynucleotide programmable DNA binding domain is a Cas9 domain. In some embodiments, the Cas9 domain is a Cas9 nickase domain. In some embodiments, the Cas9 domain comprises a SpCas9 domain. In some embodiments, the SpCas9 domain comprises a D10A and/or a H840A amino acid substitution as numbered in SEQ ID NO: 1 or corresponding amino acid substitutions thereof. In some embodiments, the Cas9 domain comprises a SaCas9 domain. In some embodiments, the Cas9 domain has specificity for an altered PAM. In some embodiments, the Cas9 domain has specificity for a PAM sequence selected from the group consisting of NGG, NGA, NGCG, NGN, NNGRRT, NNNRRT, NGCG, NGCN, NGTN, and NGC, wherein N is A, G, C, or T and wherein R is A or G.

[0046] In some aspects, provided herein, is a vector comprising the nucleic acid sequence encoding the polynucleotide programmable DNA binding domain and the nucleic acid sequence encoding the adenosine deaminase domain in the base editor system described herein. In some embodiments, the vector further comprises the nucleic acid sequence encoding the guide polynucleotide. In some embodiments, the vector is a viral vector.

[0047] In some aspects, provided herein, is a cell comprising the base editor system or the vector described herein. In some embodiments, the cell is a mammalian cell, a human cell, or a motor neuron. In some embodiments, the cell is in vivo, ex vivo, or in vitro. In some embodiments, the cell is an autologous cell isolated from a subject. In some embodiments, the cell is an allogeneic cell.

[0048] In some aspects, provided herein, is a population of cells comprising the base editor system or the vector described herein. In some embodiments, the population of cells is mammalian cells, human cells, or motor neurons. In some embodiments, the population of cells is in vivo, ex vivo, or in vitro. In some embodiments, the cell is an autologous cell isolated from a subject.

[0049] In some aspects, provided herein, is a pharmaceutical composition comprising the base editor, the vector, or the cell described herein and a pharmaceutically acceptable carrier.

[0050] In one embodiment, the pharmaceutical composition described herein further comprises a lipid. In another embodiment, the pharmaceutical composition described herein further comprises a virus.

[0051] In some aspects, provided herein, is a kit comprising the base editor system or the vector described herein.

[0052] In various embodiments of the methods described herein, at least one nucleotide of the guide polynucleotide comprises a non-naturally occurring modification. In various embodiments of the methods described herein, at least one nucleotide of the nucleic acid sequence comprises a non-naturally occurring modification. In various embodiments of the methods described herein, at least one nucleotide of the nucleic acid sequence of the base editor system comprises a non-naturally occurring modification. In some embodiments, the non-naturally occurring modification is a chemical modification. In some embodiments, the chemical modification is a 2′-O-methylation. In some embodiments, the nucleic acid sequence comprises a phosphorothioate.

[0053] The description and examples herein illustrate embodiments of the present disclosure in detail. It is to be understood that this disclosure is not limited to the particular embodiments described herein and as such can vary. Those of skill in the art will recognize that there are numerous variations and modifications of this disclosure, which are encompassed within its scope.

[0054] The practice of some embodiments disclosed herein employ, unless otherwise indicated, conventional techniques of immunology, biochemistry, chemistry, molecular biology, microbiology, cell biology, genomics and recombinant DNA, which are within the skill of the art. See for example Sambrook and Green, Molecular Cloning: A Laboratory Manual, 4th Edition (2012); the series Current Protocols in Molecular Biology (F. M. Ausubel, et al. eds.); the series Methods In Enzymology (Academic Press, Inc.), PCR 2: A Practical Approach (M. J. MacPherson, B. D. Hames and G. R. Taylor eds. (1995)), Harlow and Lane, eds. (1988) Antibodies, A Laboratory Manual, and Culture of Animal Cells: A Manual of Basic Technique and Specialized Applications, 6th Edition (R.I. Freshney, ed. (2010)).

[0055] The section headings used herein are for organizational purposes only and are not to be construed as limiting the subject matter described.

[0056] Although various features of the present disclosure can be described in the context of a single embodiment, the features can also be provided separately or in any suitable combination. Conversely, although the present disclosure can be described herein in the context of separate embodiments for clarity, the present disclosure can also be implemented in a single embodiment. The section headings used herein are for organizational purposes only and are not to be construed as limiting the subject matter described.

[0057] The features of the present disclosure are set forth with particularity in the appended claims. A better understanding of the features and advantages of the present will be obtained by reference to the following detailed description that sets forth illustrative embodiments, in which the principles of the disclosure are utilized, and in view of the accompanying drawings as described hereinbelow.

### Definitions

[0058] The following definitions supplement those in the art and are directed to the current application and are not to be imputed to any related or unrelated case, e.g., to any commonly owned patent or application. Although any methods and materials similar or equivalent to those described herein can be used in the practice for testing of the present disclosure, the preferred materials and methods are described herein. Accordingly, the terminology used herein is for the purpose of describing particular embodiments only, and is not intended to be limiting.

[0059] Unless defined otherwise, all technical and scientific terms used herein have the meaning commonly understood by a person skilled in the art to which this invention belongs. The following references provide one of skill with a general definition of many of the terms used in this invention: Singleton et al., Dictionary of Microbiology and Molecular Biology (2nd ed. 1994); The Cambridge Dictionary of Science and Technology (Walker ed., 1988); The Glossary of Genetics, 5th Ed., R. Rieger et al. (eds.), Springer Verlag (1991); and Hale & Marham, The Harper Collins Dictionary of Biology (1991).

[0060] In this application, the use of the singular includes the plural unless specifically stated otherwise. It must be noted that, as used in the specification, the singular forms “a,” “an,” and “the” include plural references unless the context clearly dictates otherwise. In this application, the use of “or” means “and/or,” unless stated otherwise, and is understood to be inclusive. Furthermore, use of the term “including” as well as other forms, such as “include,” “includes,” and “included,” is not limiting.

[0061] As used in this specification and claim(s), the words “comprising” (and any form of comprising, such as “comprise” and “comprises”), “having” (and any form of having, such as “have” and “has”), “including” (and any form of including, such as “includes” and “include”) or “containing” (and any form of containing, such as “contains” and “contain”) are inclusive or open-ended and do not exclude additional, unrecited elements or method steps. It is contemplated that any embodiment discussed in this specification can be implemented with respect to any method or composition of the present disclosure, and vice versa. Furthermore, compositions of the present disclosure can be used to achieve methods of the present disclosure.

[0062] The term “about” or “approximately” means within an acceptable error range for the particular value as determined by one of ordinary skill in the art, which will depend in part on how the value is measured or determined, i.e., the limitations of the measurement system. For example, “about” can mean within 1 or more than 1 standard deviation, per the practice in the art. Alternatively, “about” can mean a range of up to 20%, up to 10%, up to 5%, or up to 1% of a given value. Alternatively, particularly with respect to biological systems or processes, the term can mean within an order of magnitude, such as within 5-fold or within 2-fold, of a value. Where particular values are described in the application and claims, unless otherwise stated the term “about” meaning within an acceptable error range for the particular value should be assumed.

[0063] Ranges provided herein are understood to be shorthand for all of the values within the range. For example, a range of 1 to 50 is understood to include any number, combination of numbers, or sub-range from the group consisting 1, 2, 3, 4, 5, 6, 7, 8, 9, 10, 11, 12, 13, 14, 15, 16, 17, 18, 19, 20, 21, 22, 23, 24, 25, 26, 27, 28, 29, 30, 31, 32, 33, 34, 35, 36, 37, 38, 39, 40, 41, 42, 43, 44, 45, 46, 47, 48, 49, or 50.

[0064] Reference in the specification to “some embodiments,” “an embodiment,” “one embodiment” or “other embodiments” means that a particular feature, structure, or characteristic described in connection with the embodiments is included in at least some embodiments, but not necessarily all embodiments, of the present disclosures.

[0065] By “abasic base editor” is meant an agent capable of excising a nucleobase and inserting a DNA nucleobase (A, T, C, or G). Abasic base editors comprise a nucleic acid glycosylase polypeptide or fragment thereof. In one embodiment, the nucleic acid glycosylase is a mutant human uracil DNA glycosylase comprising an Asp at amino acid 204 (e.g., replacing an Asn at amino acid 204) in the following sequence, or corresponding position in a uracil DNA glycosylase, and having cytosine-DNA glycosylase activity, or active fragment thereof. In one embodiment, the nucleic acid glycosylase is a mutant human uracil DNA glycosylase comprising an Ala, Gly, Cys, or Ser at amino acid 147 (e.g., replacing a Tyr at amino acid 147) in the following sequence, or corresponding position in a uracil DNA glycosylase, and having thymine-DNA glycosylase activity, or an active fragment thereof. The sequence of exemplary human uracil-DNA glycosylase, isoform 1, follows:

| | |
|---|---|
| 1 | mgvfclgpwg lgrklrtpgk gplqllsrlc gdhlqaipak |
| | kapagqeepg tppssplsae |
| 61 | qldrigrnka aallrlaarn vpvgfgeswk khlsgefgkp |
| | yfiklmgfva eerkhytvyp |
| 121 | pphqvftwtq mcdikdvkvv ilgqdpyhgp nqahglcfsv |
| | grpvppppsl eniykelstd |
| 181 | iedfvhpghg dlsgwakqgv lllnavltvr ahqanshker |
| | gweqftdavv swlnqnsngl |
| 241 | vfllwgsyaq kkgsaidrkr hhvlqtahps plsvyrgffg |
| | crhfsktnel lqksgkkpid |
| 301 | wkel |

[0066] The sequence of human uracil-DNA glycosylase, isoform 2, follows:

| | |
|---|---|
| 1 | migqktlysf fspsparkrh apspepavqg tgvagvpees |
| | gdaaaipakk apagqeepgt |
| 61 | ppssplsaeq ldriqrnkaa allrlaarnv pvgfgeswkk |
| | hlsgefgkpy fiklmgfvae |
| 121 | erkhytvypp phqvftwtqm cdikdvkvvi lgqdpyhgpn |
| | qahglcfsvg rpvppppsle |
| 181 | niykelstdi edfvhpghgd lsgwakqgvl llnavltvra |
| | hqanshkerg weqftdavvs |
| 241 | wlnqnsnglv fllwgsyaqk kgsaidrkrh hvlqtahpsp |
| | lsvyrgffgc rhfsktnell |
| 301 | qksgkkpidw kel |

[0067] In other embodiments, the abasic editor is any one of the abasic editors described PCT/JP2015/080958 and US20170321210, which are incorporated herein by reference. In particular embodiments, the abasic editor comprises a mutation at a position shown in the sequence above in bold with underlining or at a corresponding amino acid in any other abasic editor or uracil deglycosylase known in the art. In one embodiment, the abasic editor comprises a mutation at Y147, N204, L272, and/or R276, or corresponding position. In another embodiment, the abasic editor comprises a Y147A or Y147G mutation, or corresponding mutation. In another embodiment, the abasic editor comprises a N204D mutation, or corresponding mutation. In another embodiment, the abasic editor comprises a L272A mutation, or corresponding mutation. In another embodiment, the abasic editor comprises a R276E or R276C mutation, or corresponding mutation.

[0068] By “adenosine deaminase” is meant a polypeptide or fragment thereof capable of catalyzing the hydrolytic deamination of adenine or adenosine. In some embodiments, the deaminase or deaminase domain is an adenosine deaminase catalyzing the hydrolytic deamination of adenosine to inosine or deoxy adenosine to deoxyinosine. In some embodiments, the adenosine deaminase catalyzes the hydrolytic deamination of adenine or adenosine in deoxyribonucleic acid (DNA). The adenosine deaminases (e.g., engineered adenosine deaminases, evolved adenosine deaminases) provided herein may be from any organism, such as a bacterium.

[0069] In some embodiments, the adenosine deaminase is a TadA deaminase. In some embodiments, the TadA deaminase is TadA variant. In some embodiments, the TadA variant is a TadA*8. In some embodiments, the deaminase or deaminase domain is a variant of a naturally occurring deaminase from an organism, such as a human, chimpanzee, gorilla, monkey, cow, dog, rat, or mouse. In some embodiments, the deaminase or deaminase domain does not occur in nature. For example, in some embodiments, the deaminase or deaminase domain is at least 50%, at least 55%, at least 60%, at least 65%, at least 70%, at least 75% at least 80%, at least 85%, at least 90%, at least 91%, at least 92%, at least 93%, at least 94%, at least 95%, at least 96%, at least 97%, at least 98%, at least 99%, at least 99.1%, at least 99.2%, at least 99.3%, at least 99.4%, at least 99.5%, at least 99.6%, at least 99.7%, at least 99.8%, or at least 99.9% identical to a naturally occurring deaminase. For example, deaminase domains are described in International PCT Application Nos. PCT/2017/045381 (WO 2018/027078) and PCT/US2016/058344 (WO 2017/070632), each of which is incorporated herein by reference for its entirety. Also, see Komor, A. C., et al., “Programmable editing of a target base in genomic DNA without double-stranded DNA cleavage” Nature 533, 420-424 (2016); Gaudelli, N. M., et al., “Programmable base editing of A⋅T to G⋅C in genomic DNA without DNA cleavage” Nature 551, 464-471 (2017); Komor, A. C., et al., “Improved base excision repair inhibition and bacteriophage Mu Gam protein yields C:G-to-T:A base editors with higher efficiency and product purity” Science Advances 3:eaao4774 (2017)), and Rees, H. A., et al., “Base editing: precision chemistry on the genome and transcriptome of living cells.” Nat Rev Genet. 2018 December; 19(12):770-788. doi: 10.1038/s41576-018-0059-1, the entire contents of which are hereby incorporated by reference.

[0070] A wild type TadA(wt) adenosine deaminase has the following sequence (also termed TadA reference sequence):

(SEQ ID NO: 2)
MSEVEFSHEYWMRHALTLAKRAWDEREVPVGAVLVHNNRVIGEGWNRPIG
RHDPTAHAEIMALRQGGLVMQNYRLIDATLYVTLEPCVMCAGAMIHSRIG
RVVFGARDAKTGAAGSLMDVLHHPGMNHRVEITEGILADECAALLSDFFR
MRRQEIKAQKKAQSSTD.

[0071] In some embodiments, the adenosine deaminase comprises an alteration in the following sequence:

MSEVEFSHEY WMRHALTLAK RARDEREVPV GAVLVLNNRV
IGEGWNRAIG LHDPTAHAEI MALRQGGLVM QNYRLIDATL
YVTFEPCVMC AGAMIHSRIG RVVFGVRNAK TGAAGSLMDV
LHYPGMNHRV EITEGILADE CAALLCYFFR MPRQVFNAQK
KAQSSTD
(also turned TadA*7.10).

[0072] In some embodiments, TadA*7.10 comprises at least one alteration. In some embodiments, TadA*7.10 comprises an alteration at amino acid 82 and/or 166. In particular embodiments, a variant of the above-referenced sequence comprises one or more of the following alterations: Y147T, Y147R, Q154S, Y123H, V82S, T166R, and/or Q154R. The alteration Y123H is also referred to herein as H123H (the alteration H123Y in TadA*7.10 reverted back to Y123H (wt)). In other embodiments, a variant of the TadA*7.10 sequence comprises a combination of alterations selected from the group consisting of: Y147T+Q154R; Y147T+Q154S; Y147R+Q154S; V82S+Q154S; V82S+Y147R; V82S+Q154R; V82S+Y123H; I76Y+V82S; V82S+Y123H+Y147T; V82S+Y123H+Y147R; V82S+Y123H+Q154R; Y147R+Q154R+Y123H; Y147R+Q154R+I76Y; Y147R+Q154R+T166R; Y123H+Y147R+Q154R+I76Y; V82S+Y123H+Y147R+Q154R; and I76Y+V82S+Y123H+Y147R+Q154R.

[0073] In other embodiments, the invention provides adenosine deaminase variants that include deletions, e.g., TadA*8, comprising a deletion of the C terminus beginning at residue 149, 150, 151, 152, 153, 154, 155, 156, or 157. In other embodiments, the adenosine deaminase variant is a TadA (e.g., TadA*8) monomer comprising one or more of the following alterations: Y147T, Y147R, Q154S, Y123H, V82S, T166R, and/or Q154R. In other embodiments, the adenosine deaminase variant is TadA (e.g., TadA*8) a monomer comprising a combination of alterations selected from the group consisting of: Y147T+Q154R; Y147T+Q154S; Y147R+Q154S; V82S+Q154S; V82S+Y147R; V82S+Q154R; V82S+Y123H; I76Y+V82S; V82S+Y123H+Y147T; V82S+Y123H+Y147R; V82S+Y123H+Q154R; Y147R+Q154R+Y123H; Y147R+Q154R+I76Y; Y147R+Q154R+T166R; Y123H+Y147R+Q154R+176Y; V82S+Y123H+Y147R+Q154R; and I76Y+V82S+Y123H+Y147R+Q154R.

[0074] In still other embodiments, the adenosine deaminase variant is a homodimer comprising two adenosine deaminase domains (e.g., TadA*8) each having one or more of the following alterations Y147T, Y147R., Q154S, Y123H. V82S, T166R, and/or Q154R. In other embodiments, the adenosine deaminase variant is a homodimer comprising two adenosine deaminase domains (e.g., TadA*8) each having a combination of alterations selected from the group consisting of: Y147T+Q154R; Y147T+Q154S; Y147R+Q154S; V82S+Q154S; V82S+Y147R; V82S+Q154R; V82S+Y123H; I76Y+V82S; V82S+Y123H+Y147T; V82S+Y123H+Y147R; V82S+Y123H+Q154R; Y147R+Q154R+Y123H; Y147R+Q154R+I76Y; Y147R+Q154R+T166R; Y123H+Y147R+Q154R+I76Y; V82S+Y123H+Y147R+Q154R; and I76Y+V82S+Y123H+Y147R+Q154R.

[0075] In other embodiments, the adenosine deaminase variant is a heterodimer comprising a wild-type TadA adenosine deaminase domain and an adenosine deaminase variant domain (e.g., TadA*8) comprising one or more of the following alterations Y147T, Y147R, Q154S, Y123H, V82S, T166R, and/or Q154R. In other embodiments, the adenosine deaminase variant is a heterodimer comprising a wild-type TadA adenosine deaminase domain and an adenosine deaminase variant domain (e.g. TadA*8) comprising a combination of alterations selected from the group consisting of: Y147T+Q154R; Y147T+Q154S; Y147R+Q154S; V82S+Q154S; V82S+Y147R; V82S+Q154R; V82S+Y123H; I76Y+V82S; V82S+Y123H+Y147T; V82S+Y123H+Y147R; V82S+Y123H+Q154R; Y147R+Q154R+Y123H; Y147R+Q154R+I76Y; Y147R+Q154R+T166R; Y123H+Y147R+Q154R+I76Y; V82S+Y123H+Y147R+Q154R; and I76Y+V82S+Y123H+Y147R+Q154R.

[0076] In other embodiments, the adenosine deaminase variant is a heterodimer comprising a TadA*7.10 domain and an adenosine deaminase variant domain (e.g., TadA*8) comprising one or more of the following alterations Y147T, Y147R, Q154S, Y123H, V82S, T166R, and/or Q154R. In other embodiments, the adenosine deaminase variant is a heterodimer comprising a TadA*7.10 domain and an adenosine deaminase variant domain (e.g. TadA*8) comprising a combination of the following alterations: Y147T+Q154R; Y147T+Q154S; Y147R+Q154S; V82S+Q154S; V82S+Y147R; V82S+Q154R; V82S+Y123H; I76Y+V82S; V82S+Y123H+Y147T; V82S+Y123H+Y147R; V82S+Y123H+Q154R; Y147R+Q154R+Y123H; Y147R+Q154R+176Y; Y147R+Q154R+T166R; Y123H+Y147R+Q154R+I76Y; V82S+Y123H+Y147R+Q154R; or I76Y+V82S+Y123H+Y147R+Q154R.

[0077] In one embodiment, the adenosine deaminase is a TadA*8 that comprises or consists essentially of the following sequence or a fragment thereof having adenosine deaminase activity:

MSEVEFSHEYWMRHALTLAKRARDEREVPVGAVLVLNNRVIGEGWNRAIG
LHDPTAHAEIMALRQGGLVMQNYRLIDATLYVTFEPCVMCAGAMIHSRIG
RVVFGVRNAKTGAAGSLMDVLHYPGMNHRVEITEGILADECAALLCTFFR
MPRQVFNAQKKAQSSTD.

[0078] In some embodiments, the TadA*8 is truncated. In some embodiments, the truncated TadA*8 is missing 1, 2, 3, 4, 5, 6, 7, 8, 9, 10, 11, 12, 13, 14, 15, 6, 17, 18, 19, or 20 N-terminal amino acid residues relative to the full length TadA*8. In some embodiments, the truncated TadA*8 is missing 1, 2, 3, 4, 5, 6, 7, 8, 9, 10, 11, 12, 13, 14, 15, 6, 17, 18, 19, or 20 C-terminal amino acid residues relative to the full length TadA*8. In some embodiments the adenosine deaminase variant is a full-length TadA*8.

[0079] In particular embodiments, an adenosine deaminase heterodimer comprises a TadA*8 domain and an adenosine deaminase domain selected from one of the following:

[0080] In particular embodiments, an adenosine deaminase heterodimer comprises a TadA*8 domain and an adenosine deaminase domain selected from one of the following:

Escherichia coli TadA:
MRRAFITGVFFLSEVEFSHEYWMRHALTLAKRAWDEREVPVGAVLVHNNR
VIGEGWNRPIGRHDPTAHAEIMALRQGGLVMQNYRLIDATLYVTLEPCVM
CAGAMIHSRIGRVVFGARDAKTGAAGSLMDVLHHPGMNHRVEITEGILAD
ECAALLSDFFRMRRQEIKAQKKAQSSTD
E. coli TadA (N-terminal truncated):
MSEVEFSHEYWMRHALTLAKRAWDEREVPVGAVLVHNNRVIGEGWNRPIG
RHDPTAHAEIMALRQGGLVMQNYRLIDATLYVTLEPCVMCAGAMIHSRIG
RVVFGARDAKTGAAGSLMDVLHHPGMNHRVEITEGILADECAALLSDFFR
MRRQEIKAQKKAQSSTD
Staphylococcus aureus (S. aureus) TadA:
MGSHMTNDIYFMTLAIEEAKKAAQLGEVPIGAIITKDDEVIARAHNLRET
LQQPTAHAEHIAIERAAKVLGSWRLEGCTLYVTLEPCVMCAGTIVMSRIP
RVVYGADDPKGGCSGSLMNLLQQSNFNHRAIVDKGVLKEACSTLLTTFFK
NLRANKKSTN
Bacillus subtilis (B. subtilis) TadA:
MTQDELYMKEAIKEAKKAEEKGEVPIGAVLVINGEIIARAHNLRETEQRS
IAHAEMLVIDEACKALGTWRLEGATLYVTLEPCPMCAGAVVLSRVEKVVF
GAFDPKGGCSGTLMNLLQEERFNHQAEVVSGVLEEECGGMLSAFFRELRK
KKKAARKNLSE
Salmonella typhimurium (S. typhimurium)
TadA:
MPPAFITGVTSLSDVELDHEYWMRHALTLAKRAWDEREVPVGAVLVHNHR
VIGEGWNRPIGRHDPTAHAEIMALRQGGLVLQNYRLLDTTLYVTLEPCVM
CAGAMVHSRIGRVVFGARDAKTGAAGSLIDVLHHPGMNHRVEIIEGVLRD
ECATLLSDFFRMRRQEIKALKKADRAEGAGPAV
Shewanella putrefaciens (S. putrefaciens)
TadA:
MDEYWMQVAMQMAEKAEAAGEVPVGAVLVKDGQQIATGYNLSISQHDPTA
HAEILCLRSAGKKLENYRLLDATLYITLEPCAMCAGAMVHSRIARVVYGA
RDEKTGAAGTVVNLLQHPAFNHQVEVTSGVLAEACSAQLSRFFKRRRDEK
KALKLAQRAQQGIE
Haemophilus influenzae F3031 (H. influenzae)
TadA:
MDAAKVRSEFDEKMMRYALELADKAEALGEIPVGAVLVDDARNIIGEGWN
LSIVQSDPTAHAEIIALRNGAKNIQNYRLLNSTLYVTLEPCTMCAGAILH
SRIKRLVFGASDYKTGAIGSRFHFFDDYKMNHTLEITSGVLAEECSQKLS
TFFQKRREEKKIEKALLKSLSDK
Caulobacter crescentus (C. crescentus)
TadA:
MRTDESEDQDHRMMRLALDAARAAAEAGETPVGAVILDPSTGEVIATAGN
GPIAAHDPTAHAEIAAMRAAAAKLGNYRLTDLTLVVTLEPCAMCAGAISH
ARIGRVVFGADDPKGGAVVHGPKFFAQPTCHWRPEVTGGVLADESADLLR
GFFRARRKAM
Geobacter sulfurreducens (G. sulfurreducens)
TadA:
MSSLKKTPIRDDAYWMGKAIREAAKAAARDEVPIGAVIVRDGAVIGRGHN
LREGSNDPSAHAEMIAIRQAARRSANWRLTGATLYVTLEPCLMCMGAIIL
ARLERVVFGCYDPKGGAAGSLYDLSADPRLNHQVRLSPGVCQEECGTMLS
DFFRDLRRRKKAKATPALFIDERKVPPEP
TadA*7.10
MSEVEFSHEYWMRHALTLAKRARDEREVPVGAVLVLNNRVIGEGWNRAIG
LHDPTAHAEIMALRQGGLVMQNYRLIDATLYVTFEPCVMCAGAMIHSRIG
RVVFGVRNAKTGAAGSLMDVLHYPGMNHRVEITEGILADECAALLCYFFR
MPRQVFNAQKKAQSSTD

[0081] Additional TadA7.10 or TadA7.10 variants contemplated as a component of a heterodimer with a TadA*8 include:

GSSGSETPGTSESATPESSGSEVEFSHEYWMRHALTLAKRARDEREVPVG
AVLVLNNRVIGEGWNRAIGLHDPTAHAEIMALRQGGLVMQNYRLIDATLY
VTFEPCVMCAGAMIHSRIGRVVFGVRNAKTGAAGSLMDVLHYPGMNHRVE
ITEGILADECAALLCYFFRMPRQVFNAQKKAQSSTD
TadA7.10 CP65
TAHAEIMALRQGGLVMQNYRLIDATLYVTFEPCVMCAGAMIHSRIGRVVF
GVRNAKTGAAGSLMDVLHYPGMNHRVEITEGILADECAALLCYFFRMPRQ
VFNAQKKAQSSTDGSSGSETPGTSESATPESSGSEVEFSHEYWMRHALTL
AKRARDEREVPVGAVLVLNNRVIGEGWNRAIGLHDP
TadA7.10 CP83
YRLIDATLYVTFEPCVMCAGAMIHSRIGRVVFGVRNAKTGAAGSLMDVLH
YPGMNHRVEITEGILADECAALLCYFFRMPRQVFNAQKKAQSSTDGSSGS
ETPGTSESATPESSGSEVEFSHEYWMRHALTLAKRARDEREVPVGAVLVL
NNRVIGEGWNRAIGLHDPTAHAEIMALRQGGLVMQN
TadA7.10 CP136
MNHRVEITEGILADECAALLCYFFRMPRQVFNAQKKAQSSTDGSSGSETP
GTSESATPESSGSEVEFSHEYWMRHALTLAKRARDEREVPVGAVLVLNNR
VIGEGWNRAIGLHDPTAHAEIMALRQGGLVMQNYRLIDATLYVTFEPCVM
CAGAMIHSRIGRVVFGVRNAKTGAAGSLMDVLHYPG
TadA7.10 C-truncate
GSSGSETPGTSESATPESSGSEVEFSHEYWMRHALTLAKRARDEREVPVG
AVLVLNNRVIGEGWNRAIGLHDPTAHAEIMALRQGGLVMQNYRLIDATLY
VTFEPCVMCAGAMIHSRIGRVVFGVRNAKTGAAGSLMDVLHYPGMNHRVE
ITEGILADECAALLCYFFRMPRQVFN
TadA7.10 C-truncate 2
GSSGSETPGTSESATPESSGSEVEFSHEYWMRHALTLAKRARDEREVPVG
AVLVLNNRVIGEGWNRAIGLHDPTAHAEIMALRQGGLVMQNYRLIDATLY
VTFEPCVMCAGAMIHSRIGRVVFGVRNAKTGAAGSLMDVLHYPGMNHRVE
ITEGILADECAALLCYFFRMPRQ
TadA7.10 delta 59-66 + C-truncate
GSSGSETPGTSESATPESSGSEVEFSHEYWMRHALTLAKRARDEREVPVG
AVLVLNNRVIGEGWNRAHAEIMALRQGGLVMQNYRLIDATLYVTFEPCVM
CAGAMIHSRIGRVVFGVRNAKTGAAGSLMDVLHYPGMNHRVEITEGILAD
ECAALLCYFFRMPRQVFN
TadA7.10 delta 59-66
GSSGSETPGTSESATPESSGSEVEFSHEYWMRHALTLAKRARDEREVPVG
AVLVLNNRVIGEGWNRAHAEIMALRQGGLVMQNYRLIDATLYVTFEPCVM
CAGAMIHSRIGRVVFGVRNAKTGAAGSLMDVLHYPGMNHRVEITEGILAD
ECAALLCYFFRMPRQVFNAQKKAQSSTD.

[0082] In some embodiments, the adenosine deaminase variant comprises an alteration in TadA7.10. In some embodiments, TadA7.10 comprises an alteration at amino acid 82 or 166. In particular embodiments, a variant in the above-referenced sequence comprises one or more of the following alterations: Y147T, Y147R, Q154S, Y123H, V82S, T166R, and Q154R. In other embodiments, the adenosine deaminase variant comprises a combination of alterations selected from the group consisting of Y147R+Q154R+Y123H; Y147R+Q154R+I76Y; Y147R+Q154R+T166R; Y147T+Q154R; Y147T+Q154S; and Y123H+Y147R+Q154R+I76Y.

[0083] In other embodiments, the invention provides adenosine deaminase variants that include deletions, e.g., TadA7.10 comprising a deletion of the C terminus beginning at residue 149, 150, 151, 152, 153, 154, 155, 156, or 157. In other embodiments, the adenosine deaminase variant is a TadA monomer comprising one or more of the following alterations: Y147T, Y147R, Q154S, Y123H, V82S, T166R, Q154R. In other embodiments, the adenosine deaminase variant is a monomer comprising the following alterations: Y147R+Q154R+Y123H; Y147R+Q154R+176Y; Y147R+Q154R+T166R; Y147T+Q154R; Y147T+Q154S; and Y123H+Y147 R+Q154R+I76Y. In still other embodiments, the adenosine deaminase variant is a homodimer comprising two adenosine deaminase domains each having one or more of the following alterations Y147T, Y147R, Q154S, Y123H, V82S, T166R, Q154R. In other embodiments, the adenosine deaminase variant is a heterodimer comprising a wild-type adenosine deaminase domain or a TadA7.10 domain and an adenosine deaminase variant domain comprising one or more of the following alterations Y147T, Y147R, Q154S, Y123H, V82S, T166R, Q154R. In other embodiments, the adenosine deaminase variant is a heterodimer comprising a TadA7.10 domain and an adenosine deaminase variant of TadA7.10 comprising the following alterations: Y147R+Q154R+Y123H; Y147R+Q154R+176Y; Y147R+Q154R+T166R; Y147T+Q154R; Y147T+Q154S; and Y123H+Y147R+Q154R+I76Y.

[0084] “Administering” is referred to herein as providing one or more compositions described herein to a patient or a subject. By way of example and without limitation, composition administration, e.g., injection, can be performed by intravenous (i.v.) injection, sub-cutaneous (s.c.) injection, intradermal (i.d.) injection, intraperitoneal (i.p.) injection, or intramuscular (i.m.) injection. One or more such routes can be employed. Parenteral administration can be, for example, by bolus injection or by gradual perfusion over time. In some embodiments, parenteral administration includes infusing or injecting intravascularly, intravenously, intramuscularly, intraarterially, intrathecally, intratumorally, intradermally, intraperitoneally, transtracheally, subcutaneously, subcuticularly, intraarticularly, subcapsularly, subarachnoidly and intrasternally. Alternatively, or concurrently, administration can be by the oral route.

[0085] By “agent” is meant any small molecule chemical compound, antibody, nucleic acid molecule, or polypeptide, or fragments thereof.

[0086] By “alteration” is meant a change (e.g. increase or decrease) in the structure, expression levels or activity of a gene or polypeptide as detected by standard art known methods such as those described herein. As used herein, an alteration includes a change in a polynucleotide or polypeptide sequence or a change in expression levels, such as a 10% change, a 25% change, a 40% change, a 50% change, or greater.

[0087] By “ameliorate” is meant decrease, suppress, attenuate, diminish, arrest, or stabilize the development or progression of a disease.

[0088] By “analog” is meant a molecule that is not identical, but has analogous functional or structural features. For example, a polynucleotide or polypeptide analog retains the biological activity of a corresponding naturally-occurring polynucleotide or polypeptide, while having certain modifications that enhance the analog's function relative to a naturally occurring polynucleotide or polypeptide. Such modifications could increase the analog's affinity for DNA, efficiency, specificity, protease or nuclease resistance, membrane permeability, and/or half-life, without altering, for example, ligand binding. An analog may include an unnatural nucleotide or amino acid.

[0089] By “base editor (BE)” or “nucleobase editor (NBE)” is meant an agent that binds a polynucleotide and has nucleobase modifying activity. In various embodiment, the base editor comprises a nucleobase modifying polypeptide (e.g., a deaminase) and a nucleic acid programmable nucleotide binding domain in conjunction with a guide polynucleotide (e.g., guide RNA). In various embodiments, the agent is a biomolecular complex comprising a protein domain having base editing activity, i.e., a domain capable of modifying a base (e.g., A, T, C, G, or U) within a nucleic acid molecule (e.g., DNA). In some embodiments, the polynucleotide programmable DNA binding domain is fused or linked to a deaminase domain. In one embodiment, the agent is a fusion protein comprising a domain having base editing activity. In another embodiment, the protein domain having base editing activity is linked to the guide RNA (e.g., via an RNA binding motif on the guide RNA and an RNA binding domain fused to the deaminase). In some embodiments, the domain having base editing activity is capable of deaminating a base within a nucleic acid molecule. In some embodiments, the base editor is capable of deaminating one or more bases within a DNA molecule. In some embodiments, the base editor is capable of deaminating an adenosine (A) within DNA. In some embodiments, the base editor is an adenosine base editor (ABE).

[0090] By “cytidine deaminase” is meant a polypeptide or fragment thereof capable of catalyzing a deamination reaction that converts an amino group to a carbonyl group. In some embodiments the cytidine deaminase has at least about 85% identity to APOBEC or AID. In one embodiment, the cytidine deaminase converts cytosine to uracil or 5-methylcytosine to thymine. PmCDA1, which is derived from Petromyzon marinus (Petromyzon marinus cytosine deaminase 1, “PmCDA1”), AID (Activation-induced cytidine deaminase; AICDA), which is derived from a mammal (e.g., human, swine, bovine, horse, monkey etc.), and APOBEC are exemplary cytidine deaminases.

[0091] In some embodiments, the base editor is a reprogrammable base editor fused to a deaminase (e.g., an adenosine deaminase or cytidine deaminase). In some embodiments, the base editor is a Cas9 fused to a deaminase (e.g., an adenosine deaminase or cytidine deaminase). In some embodiments, the base editor is a nuclease-inactive Cas9 (dCas9) fused to a deaminase (e.g., an adenosine deaminase or cytidine deaminase). In some embodiments, the Cas9 is a circular permutant Cas9 (e.g., spCas9 or saCas9). Circular permutant Cas9s are known in the art and described, for example, in Oakes et al., Cell 176, 254-267, 2019. In some embodiments, the base editor is fused to an inhibitor of base excision repair, for example, a UGI domain, or a dISN domain. In some embodiments, the fusion protein comprises a Cas9 nickase fused to a deaminase and an inhibitor of base excision repair, such as a UGI or dISN domain. In other embodiments, the base editor is an abasic base editor.

[0092] In some embodiments, the base editor is an adenosine base editor (ABE). In some embodiments, an adenosine deaminase is evolved from TadA. In some embodiments, the base editors of the present invention comprise a napDNAbp domain with an internally fused catalytic (e.g., deaminase) domain. In some embodiments, the napDNAbp is a Cas12a (Cpf1) with an internally fused deaminase domain. In some embodiments, the napDNAbp is a Cas12b (c2c1) with an internally fused deaminase domain. In some embodiments, the napDNAbp is a Cas12c (c2c3) with an internally fused deaminase domain. In some embodiments, the napDNAbp is a Cas12d (CasX) with an internally fused deaminase domain. In some embodiments, the napDNAbp is a Cas12e (CasY) with an internally fused deaminase domain. In some embodiments, the napDNAbp is a Cas12g with an internally fused deaminase domain. In some embodiments, the napDNAbp is a Cas12h with an internally fused deaminase domain. In some embodiments, napDNAbp is a Cas12i with an internally fused deaminase domain. In some embodiments, the base editor is a catalytically dead Cas12 (dCas12) fused to a deaminase domain. In some embodiments, the base editor is a Cas12 nickase (nCas12) fused to a deaminase domain.

[0093] In some embodiments, base editors are generated (e.g., ABE8) by cloning an adenosine deaminase variant (e.g., TadA*8) into a scaffold that includes a circular permutant Cas9 (e.g., spCAS9 or saCAS9) and a bipartite nuclear localization sequence. Circular permutant Cas9s are known in the art and described, for example, in Oakes et al., Cell 176, 254-267, 2019. Exemplary circular permutants follow where the bold sequence indicates sequence derived from Cas9, the italics sequence denotes a linker sequence, and the underlined sequence denotes a bipartite nuclear localization sequence.

[0094] CP5 (with MSP “NGC=Pam Variant with mutations Regular Cas9 likes NGG” PID=Protein Interacting Domain and “D10A” nickase):

EIGKATAKYFFYSNIMNFFKTEITLANGEIRKRPLIETNGETGEIVWDKG
RDFATVRKVLSMPQVNIVKKTEVQTGGFSKESILPKRNSDKLIARKKDWD
PKKYGGFMQPTVAYSVLVVAKVEKGKSKKLKSVKELLGITIMERSSFEKN
PIDFLEAKGYKEVKKDLIIKLPKYSLFELENGRKRMLASAKFLQKGNELA
LPSKYVNFLYLASHYEKLKGSPEDNEQKQLFVEQHKHYLDEIIEQISEFS
KRVILADANLDKVLSAYNKHRDKPIREQAENIIHLFTLTNLGAPRAFKYF
DTTIARKEYRSTKEVLDATLIHQSITGLYETRIDLSQLGGDGGSGGSGGS
GGSGGSGGSGGMDKKYSIGLAIGTNSVGWAVITDEYKVPSKKFKVLGNTD
RHSIKKNLIGALLFDSGETAEATRLKRTARRRYTRRKNRICYLQEIFSNE
MAKVDDSFFHRLEESFLVEEDKKHERHPIFGNIVDEVAYHEKYPTIYHLR
KKLVDSTDKADLRLIYLALAHMIKFRGHFLIEGDLNPDNSDVDKLFIQLV
QTYNQLFEENPINASGVDAKAILSARLSKSRRLENLIAQLPGEKKNGLFG
NLIALSLGLTPNFKSNFDLAEDAKLQLSKDTYDDDLDNLLAQIGDQYADL
FLAAKNLSDAILLSDILRVNTEITKAPLSASMIKRYDEHHQDLTLLKALV
RQQLPEKYKEIFFDQSKNGYAGYIDGGASQEEFYKFIKPILEKMDGTEEL
LVKLNREDLLRKQRTFDNGSIPHQIHLGELHAILRRQEDFYPFLKDNREK
IEKILTFRIPYYVGPLARGNSRFAWMTRKSEETITPWNFEEVVDKGASAQ
SFIERMTNFDKNLPNEKVLPKHSLLYEYFTVYNELTKVKYVTEGMRKPAF
LSGEQKKAIVDLLFKTNRKVTVKQLKEDYFKKIECFDSVEISGVEDRFNA
SLGTYHDLLKIIKDKDFLDNEENEDILEDIVLTLTLFEDREMIEERLKTY
AHLFDDKVMKQLKRRRYTGWGRLSRKLINGIRDKQSGKTILDFLKSDGFA
NRNFMQLIHDDSLTFKEDIQKAQVSGQGDSLHEHIANLAGSPAIKKGILQ
TVKVVDELVKVMGRHKPENIVIEMARENQTTQKGQKNSRERMKRIEEGIK
ELGSQILKEHPVENTQLQNEKLYLYYLQNGRDMYVDQELDINRLSDYDVD
HIVPQSFLKDDSIDNKVLTRSDKNRGKSDNVPSEEVVKKMKNYWRQLLNA
KLITQRKFDNLTKAERGGLSELDKAGFIKRQLVETRQITKHVAQILDSRM
NTKYDENDKLIREVKVITLKSKLVSDFRKDFQFYKVREINNYHHAHDAYL
NAVVGTALIKKYPKLESEFVYGDYKVYDVRKMIAKSEQEGADKRTADGSE
FESPKKKRKV*

[0095] In some embodiments, the ABE8 is selected from a base editor from Table 6-9, 13, or 14 infra. In some embodiments, ABE8 contains an adenosine deaminase variant evolved from TadA. In some embodiments, the adenosine deaminase variant of ABE8 is a TadA*8 variant as described in Table 7, 9, 13 or 14 infra. In some embodiments, the adenosine deaminase variant is TadA*7.10 variant (e.g. TadA*8) comprising one or more of an alteration selected from the group of Y147T, Y147R, Q154S, Y123H, V82S, T166R, and/or Q154R. In various embodiments, ABE8 comprises TadA*7.10 variant (e.g. TadA*8) with a combination of alterations selected from the group consisting of Y147T+Q154R; Y147T+Q154S; Y147R+Q154S; V82S+Q154S; V82S+Y147R; V82S+Q154R; V82S+Y123H; I76Y+V82S; V82S+Y123H+Y147T; V82S+Y123H+Y147R; V82S+Y123H+Q154R; Y147R+Q154R+Y123H; Y147R+Q154R+176Y; Y147R+Q154R+T166R; Y123H+Y147R+Q154R+I76Y; V82S+Y123H+Y147R+Q154R; and I76Y+V82S+Y123H+Y147R+Q154R. In some embodiments ABE8 is a monomeric construct. In some embodiments, ABE8 is a heterodimeric construct. In some embodiments, the ABE8 base editor comprises the sequence:

MSEVEFSHEYWMRHALTLAKRARDEREVPVGAVLVLNNRVIGEGWNRAIG
LHDPTAHAEIMALRQGGLVMQNYRLIDATLYVTFEPCVMCAGAMIHSRIG
RVVFGVRNAKTGAAGSLMDVLHYPGMNHRVEITEGILADECAALLCTFFR
MPRQVFNAQKKAQSSTD.

[0096] In some embodiments, the polynucleotide programmable DNA binding domain is a CRISPR associated (e.g., Cas or Cpf1) enzyme. In some embodiments, the base editor is a catalytically dead Cas9 (dCas9) fused to a deaminase domain. In some embodiments, the base editor is a Cas9 nickase (nCas9) fused to a deaminase domain. In some embodiments, the base editor is fused to an inhibitor of base excision repair (BER). In some embodiments, the inhibitor of base excision repair is a uracil DNA glycosylase inhibitor (UGI). In some embodiments, the inhibitor of base excision repair is an inosine base excision repair inhibitor.

[0097] Details of base editors are described in International PCT Application Nos. PCT/2017/045381 (WO 2018/027078) and PCT/US2016/058344 (WO 2017/070632), each of which is incorporated herein by reference for its entirety. Also see Komor, A. C., et al., “Programmable editing of a target base in genomic DNA without double-stranded DNA cleavage” Nature 533, 420-424 (2016); Gaudelli, N. M., et al., “Programmable base editing of A⋅T to G⋅C in genomic DNA without DNA cleavage” Nature 551, 464-471 (2017); Komor, A. C., et al., “Improved base excision repair inhibition and bacteriophage Mu Gam protein yields C:G-to-T:A base editors with higher efficiency and product purity” Science Advances 3:eaao4774 (2017), and Rees, H. A., et al., “Base editing: precision chemistry on the genome and transcriptome of living cells.” Nat Rev Genet. 2018 December; 19(12):770-788. doi: 10.1038/s41576-018-0059-1, the entire contents of which are hereby incorporated by reference.

[0098] By way of example, a cytidine base editor as used in the base editing compositions, systems and methods described herein has the following nucleic acid sequence (8877 base pairs), (Addgene, Watertown, Mass.; Komor A C, et al., 2017, Sci Adv., 30; 3(8):eaao4774. doi: 10.1126/sciadv.aao4774) as provided below. Polynucleotide sequences having at least 95% or greater identity to the BE4 nucleic acid sequence are also encompassed.

| | |
|---|---|
| 1 | atatgccaag tacgccccct attgacgtca atgacggtaa |
| | atggcccgcc tggcattatg |
| 61 | cccagtacat gaccttatgg gactttccta cttggcagta |
| | catctacgta ttagtcatcg |
| 121 | ctattaccat ggtgatgcgg ttttggcagt acatcaatgg |
| | gcgtggatag cggtttgact |
| 181 | cacggggatt tccaagtctc caccccattg acgtcaatgg |
| | gagtttgttt tggcaccaaa |
| 241 | atcaacggga ctttccaaaa tgtcgtaaca actccgcccc |
| | attgacgcaa atgggcggta |
| 301 | ggcgtgtacg gtgggaggtc tatataagca gagctggttt |
| | agtgaaccgt cagatccgct |
| 361 | agagatccgc ggccgctaat acgactcact atagggagag |
| | ccgccaccat gagctcagag |
| 421 | actggcccag tggctgtgga ccccacattg agacggcgga |
| | tcgagcccca tgagtttgag |
| 481 | gtattcttcg atccgagaga gctccgcaag gagacctgcc |
| | tgctttacga aattaattgg |
| 541 | gggggccggc actccatttg gcgacataca tcacagaaca |
| | ctaacaagca cgtcgaagtc |
| 601 | aacttcatcg agaagttcac gacagaaaga tatttctgtc |
| | cgaacacaag gtgcagcatt |
| 661 | acctggtttc tcagctggag cccatgcggc gaatgtagta |
| | gggccatcac tgaattcctg |
| 721 | tcaaggtatc cccacgtcac tctgtttatt tacatcgcaa |
| | ggctgtacca ccacgctgac |
| 781 | ccccgcaatc gacaaggcct gcgggatttg atctcttcag |
| | gtgtgactat ccaaattatg |
| 841 | actgagcagg agtcaggata ctgctggaga aactttgtga |
| | attatagccc gagtaatgaa |
| 901 | gcccactggc ctaggtatcc ccatctgtgg gtacgactgt |
| | acgttcttga actgtactgc |
| 961 | atcatactgg gcctgcctcc ttgtctcaac attctgagaa |
| | ggaagcagcc acagctgaca |
| 1021 | ttctttacca tcgctcttca gtcttgtcat taccagcgac |
| | tgcccccaca cattctctgg |
| 1081 | gccaccgggt tgaaatctgg tggttcttct ggtggttcta |
| | gcggcagcga gactcccggg |
| 1141 | acctcagagt ccgccacacc cgaaagttct ggtggttctt |
| | ctggtggttc tgataaaaag |
| 1201 | tattctattg gtttagccat cggcactaat tccgttggat |
| | gggctgtcat aaccgatgaa |
| 1261 | tacaaagtac cttcaaagaa atttaaggtg ttggggaaca |
| | cagaccgtca ttcgattaaa |
| 1321 | aagaatctta tcggtgccct cctattcgat agtggcgaaa |
| | cggcagaggc gactcgcctg |
| 1381 | aaacgaaccg ctcggagaag gtatacacgt cgcaagaacc |
| | gaatatgtta cttacaagaa |
| 1441 | atttttagca atgagatggc caaagttgac gattctttct |
| | ttcaccgttt ggaagagtcc |
| 1501 | ttccttgtcg aagaggacaa gaaacatgaa cggcacccca |
| | tctttggaaa catagtagat |
| 1561 | gaggtggcat atcatgaaaa gtacccaacg atttatcacc |
| | tcagaaaaaa gctagttgac |
| 1621 | tcaactgata aagcggacct gaggttaatc tacttggctc |
| | ttgcccatat gataaagttc |
| 1681 | cgtgggcact ttctcattga gggtgatcta aatccggaca |
| | actcggatgt cgacaaactg |
| 1741 | ttcatccagt tagtacaaac ctataatcag ttgtttgaag |
| | agaaccctat aaatgcaagt |
| 1801 | ggcgtggatg cgaaggctat tcttagcgcc cgcctctcta |
| | aatcccgacg gctagaaaac |
| 1861 | ctgatcgcac aattacccgg agagaagaaa aatgggttgt |
| | tcggtaacct tatagcgctc |
| 1921 | tcactaggcc tgacaccaaa ttttaagtcg aacttcgact |
| | tagctgaaga tgccaaattg |
| 1981 | cagcttagta aggacacgta cgatgacgat ctcgacaatc |
| | tactggcaca aattggagat |
| 2041 | cagtatgcgg acttattttt ggctgccaaa aaccttagcg |
| | atgcaatcct cctatctgac |
| 2101 | atactgagag ttaatactga gattaccaag gcgccgttat |
| | ccgcttcaat gatcaaaagg |
| 2161 | tacgatgaac atcaccaaga cttgacactt ctcaaggccc |
| | tagtccgtca gcaactgcct |
| 2221 | gagaaatata aggaaatatt ctttgatcag tcgaaaaacg |
| | ggtacgcagg ttatattgac |
| 2281 | ggcggagcga gtcaagagga attctacaag tttatcaaac |
| | ccatattaga gaagatggat |
| 2341 | gggacggaag agttgcttgt aaaactcaat cgcgaagatc |
| | tactgcgaaa gcagcggact |
| 2401 | ttcgacaacg gtagcattcc acatcaaatc cacttaggcg |
| | aattgcatgc tatacttaga |
| 2461 | aggcaggagg atttttatcc gttcctcaaa gacaatcgtg |
| | aaaagattga gaaaatccta |
| 2521 | acctttcgca taccttacta tgtgggaccc ctggcccgag |
| | ggaactctcg gttcgcatgg |
| 2581 | atgacaagaa agtccgaaga aacgattact ccatggaatt |
| | ttgaggaagt tgtcgataaa |
| 2641 | ggtgcgtcag ctcaatcgtt catcgagagg atgaccaact |
| | ttgacaagaa tttaccgaac |
| 2701 | gaaaaagtat tgcctaagca cagtttactt tacgagtatt |
| | tcacagtgta caatgaactc |
| 2761 | acgaaagtta agtatgtcac tgagggcatg cgtaaacccg |
| | cctttctaag cggagaacag |
| 2821 | aagaaagcaa tagtagatct gttattcaag accaaccgca |
| | aagtgacagt taagcaattg |
| 2881 | aaagaggact actttaagaa aattgaatgc ttcgattctg |
| | tcgagatctc cggggtagaa |
| 2941 | gatcgattta atgcgtcact tggtacgtat catgacctcc |
| | taaagataat taaagataag |
| 3001 | gacttcctgg ataacgaaga gaatgaagat atcttagaag |
| | atatagtgtt gactcttacc |
| 3061 | ctctttgaag atcgggaaat gattgaggaa agactaaaaa |
| | catacgctca cctgttcgac |
| 3121 | gataaggtta tgaaacagtt aaagaggcgt cgctatacgg |
| | gctggggacg attgtcgcgg |
| 3181 | aaacttatca acgggataag agacaagcaa agtggtaaaa |
| | ctattctcga ttttctaaag |
| 3241 | agcgacggct tcgccaatag gaactttatg cagctgatcc |
| | atgatgactc tttaaccttc |
| 3301 | aaagaggata tacaaaaggc acaggtttcc ggacaagggg |
| | actcattgca cgaacatatt |
| 3361 | gcgaatcttg ctggttcgcc agccatcaaa aagggcatac |
| | tccagacagt caaagtagtg |
| 3421 | gatgagctag ttaaggtcat gggacgtcac aaaccggaaa |
| | acattgtaat cgagatggca |
| 3481 | cgcgaaaatc aaacgactca gaaggggcaa aaaaacagtc |
| | gagagcggat gaagagaata |
| 3541 | gaagagggta ttaaagaact gggcagccag atcttaaagg |
| | agcatcctgt ggaaaatacc |
| 3601 | caattgcaga acgagaaact ttacctctat tacctacaaa |
| | atggaaggga catgtatgtt |
| 3661 | gatcaggaac tggacataaa ccgtttatct gattacgacg |
| | tcgatcacat tgtaccccaa |
| 3721 | tcctttttga aggacgattc aatcgacaat aaagtgctta |
| | cacgctcgga taagaaccga |
| 3781 | gggaaaagtg acaatgttcc aagcgaggaa gtcgtaaaga |
| | aaatgaagaa ctattggcgg |
| 3841 | cagctcctaa atgcgaaact gataacgcaa agaaagttcg |
| | ataacttaac taaagctgag |
| 3901 | aggggtggct tgtctgaact tgacaaggcc ggatttatta |
| | aacgtcagct cgtggaaacc |
| 3961 | cgccaaatca caaagcatgt tgcacagata ctagattccc |
| | gaatgaatac gaaatacgac |
| 4021 | gagaacgata agctgattcg ggaagtcaaa gtaatcactt |
| | taaagtcaaa attggtgtcg |
| 4081 | gacttcagaa aggattttca attctataaa gttagggaga |
| | taaataacta ccaccatgcg |
| 4141 | cacgacgctt atcttaatgc cgtcgtaggg accgcactca |
| | ttaagaaata cccgaagcta |
| 4201 | gaaagtgagt ttgtgtatgg tgattacaaa gtttatgacg |
| | tccgtaagat gatcgcgaaa |
| 4261 | agcgaacagg agataggcaa ggctacagcc aaatacttct |
| | tttattctaa cattatgaat |
| 4321 | ttctttaaga cggaaatcac tctggcaaac ggagagatac |
| | gcaaacgacc tttaattgaa |
| 4381 | accaatgggg agacaggtga aatcgtatgg gataagggcc |
| | gggacttcgc gacggtgaga |
| 4441 | aaagttttgt ccatgcccca agtcaacata gtaaagaaaa |
| | ctgaggtgca gaccggaggg |
| 4501 | ttttcaaagg aatcgattct tccaaaaagg aatagtgata |
| | agctcatcgc tcgtaaaaag |
| 4561 | gactgggacc cgaaaaagta cggtggcttc gatagcccta |
| | cagttgccta ttctgtccta |
| 4621 | gtagtggcaa aagttgagaa gggaaaatcc aagaaactga |
| | agtcagtcaa agaattattg |
| 4681 | gggataacga ttatggagcg ctcgtctttt gaaaagaacc |
| | ccatcgactt ccttgaggcg |
| 4741 | aaaggttaca aggaagtaaa aaaggatctc ataattaaac |
| | taccaaagta tagtctgttt |
| 4801 | gagttagaaa atggccgaaa acggatgttg gctagcgccg |
| | gagagcttca aaaggggaac |
| 4861 | gaactcgcac taccgtctaa atacgtgaat ttcctgtatt |
| | tagcgtccca ttacgagaag |
| 4921 | ttgaaaggtt cacctgaaga taacgaacag aagcaacttt |
| | ttgttgagca gcacaaacat |
| 4981 | tatctcgacg aaatcataga gcaaatttcg gaattcagta |
| | agagagtcat cctagctgat |
| 5041 | gccaatctgg acaaagtatt aagcgcatac aacaagcaca |
| | gggataaacc catacgtgag |
| 5101 | caggcggaaa atattatcca tttgtttact cttaccaacc |
| | tcggcgctcc agccgcattc |
| 5161 | aagtattttg acacaacgat agatcgcaaa cgatacactt |
| | ctaccaagga ggtgctagac |
| 5221 | gcgacactga ttcaccaatc catcacggga ttatatgaaa |
| | ctcggataga tttgtcacag |
| 5281 | cttgggggtg actctggtgg ttctggagga tctggtggtt |
| | ctactaatct gtcagatatt |
| 5341 | attgaaaagg agaccggtaa gcaactggtt atccaggaat |
| | ccatcctcat gctcccagag |
| 5401 | gaggtggaag aagtcattgg gaacaagccg gaaagcgata |
| | tactcgtgca caccgcctac |
| 5461 | gacgagagca ccgacgagaa tgtcatgctt ctgactagcg |
| | acgcccctga atacaagcct |
| 5521 | tgggctctgg tcatacagga tagcaacggt gagaacaaga |
| | ttaagatgct ctctggtggt |
| 5581 | tctggaggat ctggtggttc tactaatctg tcagatatta |
| | ttgaaaagga gaccggtaag |
| 5641 | caactggtta tccaggaatc catcctcatg ctcccagagg |
| | aggtggaaga agtcattggg |
| 5701 | aacaagccgg aaagcgatat actcgtgcac accgcctacg |
| | acgagagcac cgacgagaat |
| 5761 | gtcatgcttc tgactagcga cgcccctgaa tacaagcctt |
| | gggctctggt catacaggat |
| 5821 | agcaacggtg agaacaagat taagatgctc tctggtggtt |
| | ctcccaagaa gaagaggaaa |
| 5881 | gtctaaccgg tcatcatcac catcaccatt gagtttaaac |
| | ccgctgatca gcctcgactg |
| 5941 | tgccttctag ttgccagcca tctgttgttt gcccctcccc |
| | cgtgccttcc ttgaccctgg |
| 6001 | aaggtgccac tcccactgtc ctttcctaat aaaatgagga |
| | aattgcatcg cattgtctga |
| 6061 | gtaggtgtca ttctattctg gggggtgggg tggggcagga |
| | cagcaagggg gaggattggg |
| 6121 | aagacaatag caggcatgct ggggatgcgg tgggctctat |
| | ggcttctgag gcggaaagaa |
| 6181 | ccagctgggg ctcgataccg tcgacctcta gctagagctt |
| | ggcgtaatca tggtcatagc |
| 6241 | tgtttcctgt gtgaaattgt tatccgctca caattccaca |
| | caacatacga gccggaagca |
| 6301 | taaagtgtaa agcctagggt gcctaatgag tgagctaact |
| | cacattaatt gcgttgcgct |
| 6361 | cactgcccgc tttccagtcg ggaaacctgt cgtgccagct |
| | gcattaatga atcggccaac |
| 6421 | gcgcggggag aggcggtttg cgtattgggc gctcttccgc |
| | ttcctcgctc actgactcgc |
| 6481 | tgcgctcggt cgttcggctg cggcgagcgg tatcagctca |
| | ctcaaaggcg gtaatacggt |
| 6541 | tatccacaga atcaggggat aacgcaggaa agaacatgtg |
| | agcaaaaggc cagcaaaagg |
| 6601 | ccaggaaccg taaaaaggcc gcgttgctgg cgtttttcca |
| | taggctccgc ccccctgacg |
| 6661 | agcatcacaa aaatcgacgc tcaagtcaga ggtggcgaaa |
| | cccgacagga ctataaagat |
| 6721 | accaggcgtt tccccctgga agctccctcg tgcgctctcc |
| | tgttccgacc ctgccgctta |
| 6781 | ccggatacct gtccgccttt ctcccttcgg gaagcgtggc |
| | gctttctcat agctcacgct |
| 6841 | gtaggtatct cagttcggtg taggtcgttc gctccaagct |
| | gggctgtgtg cacgaacccc |
| 6901 | ccgttcagcc cgaccgctgc gccttatccg gtaactatcg |
| | tcttgagtcc aacccggtaa |
| 6961 | gacacgactt atcgccactg gcagcagcca ctggtaacag |
| | gattagcaga gcgaggtatg |
| 7021 | taggcggtgc tacagagttc ttgaagtggt ggcctaacta |
| | cggctacact agaagaacag |
| 7081 | tatttggtat ctgcgctctg ctgaagccag ttaccttcgg |
| | aaaaagagtt ggtagctctt |
| 7141 | gatccggcaa acaaaccacc gctggtagcg gtggtttttt |
| | tgtttgcaag cagcagatta |
| 7201 | cgcgcagaaa aaaaggatct caagaagatc ctttgatctt |
| | ttctacgggg tctgacgctc |
| 7261 | agtggaacga aaactcacgt taagggattt tggtcatgag |
| | attatcaaaa aggatcttca |
| 7321 | cctagatcct tttaaattaa aaatgaagtt ttaaatcaat |
| | ctaaagtata tatgagtaaa |
| 7381 | cttggtctga cagttaccaa tgcttaatca gtgaggcacc |
| | tatctcagcg atctgtctat |
| 7441 | ttcgttcatc catagttgcc tgactccccg tcgtgtagat |
| | aactacgata cgggagggct |
| 7501 | taccatctgg ccccagtgct gcaatgatac cgcgagaccc |
| | acgctcaccg gctccagatt |
| 7561 | tatcagcaat aaaccagcca gccggaaggg ccgagcgcag |
| | aagtggtcct gcaactttat |
| 7621 | ccgcctccat ccagtctatt aattgttgcc gggaagctag |
| | agtaagtagt tcgccagtta |
| 7681 | atagtttgcg caacgttgtt gccattgcta caggcatcgt |
| | ggtgtcacgc tcgtcgtttg |
| 7741 | gtatggcttc attcagctcc ggttcccaac gatcaaggcg |
| | agttacatga tcccccatgt |
| 7801 | tgtgcaaaaa agcggttagc tccttcggtc ctccgatcgt |
| | tgtcagaagt aagttggccg |
| 7861 | cagtgttatc actcatggtt atggcagcac tgcataattc |
| | tcttactgtc atgccatccg |
| 7921 | taagatgctt ttctgtgact ggtgagtact caaccaagtc |
| | attctgagaa tagtgtatgc |
| 7981 | ggcgaccgag ttgctcttgc ccggcgtcaa tacgggataa |
| | taccgcgcca catagcagaa |
| 8041 | ctttaaaagt gctcatcatt ggaaaacgtt cttcggggcg |
| | aaaactctca aggatcttac |
| 8101 | cgctgttgag atccagttcg atgtaaccca ctcgtgcacc |
| | caactgatct tcagcatctt |
| 8161 | ttactttcac cagcgtttct gggtgagcaa aaacaggaag |
| | gcaaaatgcc gcaaaaaagg |
| 8221 | gaataagggc gacacggaaa tgttgaatac tcatactctt |
| | cctttttcaa tattattgaa |
| 8281 | gcatttatca gggttattgt ctcatgagcg gatacatatt |
| | tgaatgtatt tagaaaaata |
| 8341 | aacaaatagg ggttccgcgc acatttcccc gaaaagtgcc |
| | acctgacgtc gacggatcgg |
| 8401 | gagatcgatc tcccgatccc ctagggtcga ctctcagtac |
| | aatctgctct gatgccgcat |
| 8461 | agttaagcca gtatctgctc cctgcttgtg tgttggaggt |
| | cgctgagtag tgcgcgagca |
| 8521 | aaatttaagc tacaacaagg caaggcttga ccgacaattg |
| | catgaagaat ctgcttaggg |
| 8581 | ttaggcgttt tgcgctgctt cgcgatgtac gggccagata |
| | tacgcgttga cattgattat |
| 8641 | tgactagtta ttaatagtaa tcaattacgg ggtcattagt |
| | tcatagccca tatatggagt |
| 8701 | tccgcgttac ataacttacg gtaaatggcc cgcctggctg |
| | accgcccaac gacccccgcc |
| 8761 | cattgacgtc aataatgacg tatgttccca tagtaacgcc |
| | aatagggact ttccattgac |
| 8821 | gtcaatgggt ggagtattta cggtaaactg cccacttggc |
| | agtacatcaa gtgtatc |

### BE4 Amino Acid Sequence:

MSSETGPVAVDPTLRRRIEPHEFEVFFDPRELRKETCLLYEINWGGRHSI
WRHTSQNTNKHVEVNFIEKFTTERYFCPNTRCSITWFLSWSPCGECSRAI
TEFLSRYPHVTLFIYIARLYHHADPRNRQGLRDLISSGVTIQIMTEQESG
YCWRNFVNYSPSNEAHWPRYPHLWVRLYVLELYCIILGLPPCLNILRRKQ
PQLTFFTIALQSCHYQRLPPHILWATGLKSGGSSGGSSGSETPGTSESAT
PESSGGSSGGSDKKYSIGLAIGTNSVGWAVITDEYKVPSKKFKVLGNTDR
HSIKKNLIGALLFDSGETAEATRLKRTARRRYTRRKNRICYLQEIFSNEM
AKVDDSFFHRLEESFLVEEDKKHERHPIFGNIVDEVAYHEKYPTIYHLRK
KLVDSTDKADLRLIYLALAHMIKFRGHFLIEGDLNPDNSDVDKLFIQLVQ
TYNQLFEENPINASGVDAKAILSARLSKSRRLENLIAQLPGEKKNGLFGN
LIALSLGLTPNFKSNFDLAEDAKLQLSKDTYDDDLDNLLAQIGDQYADLF
LAAKNLSDAILLSDILRVNTEITKAPLSASMIKRYDEHHQDLTLLKALVR
QQLPEKYKEIFFDQSKNGYAGYIDGGASQEEFYKFIKPILEKMDGTEELL
VKLNREDLLRKQRTFDNGSIPHQIHLGELHAILRRQEDFYPFLKDNREKI
EKILTFRIPYYVGPLARGNSRFAWMTRKSEETITPWNFEEVVDKGASAQS
FIERMTNFDKNLPNEKVLPKHSLLYEYFTVYNELTKVKYVTEGMRKPAFL
SGEQKKAIVDLLFKTNRKVTVKQLKEDYFKKIECFDSVEISGVEDRFNAS
LGTYHDLLKIIKDKDFLDNEENEDILEDIVLTLTLFEDREMIEERLKTYA
HLFDDKVMKQLKRRRYTGWGRLSRKLINGIRDKQSGKTILDFLKSDGFAN
RNFMQLIHDDSLTFKEDIQKAQVSGQGDSLHEHIANLAGSPAIKKGILQT
VKVVDELVKVMGRHKPENIVIEMARENQTTQKGQKNSRERMKRIEEGIKE
LGSQILKEHPVENTQLQNEKLYLYYLQNGRDMYVDQELDINRLSDYDVDH
IVPQSFLKDDSIDNKVLTRSDKNRGKSDNVPSEEVVKKMKNYWRQLLNAK
LITQRKFDNLTKAERGGLSELDKAGFIKRQLVETRQITKHVAQILDSRMN
TKYDENDKLIREVKVITLKSKLVSDFRKDFQFYKVREINNYHHAHDAYLN
AVVGTALIKKYPKLESEFVYGDYKVYDVRKMIAKSEQEIGKATAKYFFYS
NIMNFFKTEITLANGEIRKRPLIETNGETGEIVWDKGRDFATVRKVLSMP
QVNIVKKTEVQTGGFSKESILPKRNSDKLIARKKDWDPKKYGGFDSPTVA
YSVLVVAKVEKGKSKKLKSVKELLGITIMERSSFEKNPIDFLEAKGYKEV
KKDLIIKLPKYSLFELENGRKRMLASAGELQKGNELALPSKYVNFLYLAS
HYEKLKGSPEDNEQKQLFVEQHKHYLDEIIEQISEFSKRVILADANLDKV
LSAYNKHRDKPIREQAENIIHLFTLTNLGAPAAFKYFDTTIDRKRYTSTK
EVLDATLIHQSITGLYETRIDLSQLGGDSGGSGGSGGSTNLSDIIEKETG
KQLVIQESILMLPEEVEEVIGNKPESDILVHTAYDESTDENVMLLTSDAP
EYKPWALVIQDSNGENKIKMLSGGSGGSGGSTNLSDIIEKETGKQLVIQE
SILMLPEEVEEVIGNKPESDILVHTAYDESTDENVMLLTSDAPEYKPWAL
VIQDSNGENKIKMLSGGSPKKKRK

[0100] By way of example, the adenine base editor (ABE) as used in the base editing compositions, systems and methods described herein has the nucleic acid sequence (8877 base pairs), (Addgene, Watertown, Mass.; Gaudelli N M, et al., Nature. 2017 Nov. 23; 551(7681):464-471. doi: 10.1038/nature24644; Koblan L W, et al., Nat Biotechnol. 2018 October; 36(9):843-846. doi: 10.1038/nbt.4172.) as provided below. Polynucleotide sequences having at least 95% or greater identity to the ABE nucleic acid sequence are also encompassed.

ATATGCCAAGTACGCCCCCTATTGACGTCAATGACGGTAAATGGCCCGCCTGGCATTATGCCCAGTAC
AT
GACCTTATGGGACTTTCCTACTTGGCAGTACATCTACGTATTAGTCATCGCTATTACCATGGTGATGC
GG
TTTTGGCAGTACATCAATGGGCGTGGATAGCGGTTTGACTCACGGGGATTTCCAAGTCTCCACCCCAT
TG
ACGTCAATGGGAGTTTGTTTTGGCACCAAAATCAACGGGACTTTCCAAAATGTCGTAACAACTCCGCC
CC
ATTGACGCAAATGGGCGGTAGGCGTGTACGGTGGGAGGTCTATATAAGCAGAGCTGGTTTAGTGAACC
GT
CAGATCCGCTAGAGATCCGCGGCCGCTAATACGACTCACTATAGGGAGAGCCGCCACCATGAAACGGA
CA
GCCGACGGAAGCGAGTTCGAGTCACCAAAGAAGAAGCGGAAAGTCTCTGAAGTCGAGTTTAGCCACGA
GT
ATTGGATGAGGCACGCACTGACCCTGGCAAAGCGAGCATGGGATGAAAGAGAAGTCCCCGTGGGCGCC
GT
GCTGGTGCACAACAATAGAGTGATCGGAGAGGGATGGAACAGGCCAATCGGCCGCCACGACCCTACCG
CA
CACGCAGAGATCATGGCACTGAGGCAGGGAGGCCTGGTCATGCAGAATTACCGCCTGATCGATGCCAC
CC
TGTATGTGACACTGGAGCCATGCGTGATGTGCGCAGGAGCAATGATCCACAGCAGGATCGGAAGAGTG
GT
GTTCGGAGCACGGGACGCCAAGACCGGCGCAGCAGGCTCCCTGATGGATGTGCTGCACCACCCCGGCA
TG
AACCACCGGGTGGAGATCACAGAGGGAATCCTGGCAGACGAGTGCGCCGCCCTGCTGAGCGATTTCTT
TA
GAATGCGGAGACAGGAGATCAAGGCCCAGAAGAAGGCACAGAGCTCCACCGACTCTGGAGGATCTAGC
GG
AGGATCCTCTGGAAGCGAGACACCAGGCACAAGCGAGTCCGCCACACCAGAGAGCTCCGGCGGCTCCT
CC
GGAGGATCCTCTGAGGTGGAGTTTTCCCACGAGTACTGGATGAGACATGCCCTGACCCTGGCCAAGAG
GG
CACGCGATGAGAGGGAGGTGCCTGTGGGAGCCGTGCTGGTGCTGAACAATAGAGTGATCGGCGAGGGC
TG
GAACAGAGCCATCGGCCTGCACGACCCAACAGCCCATGCCGAAATTATGGCCCTGAGACAGGGCGGCC
TG
GTCATGCAGAACTACAGACTGATTGACGCCACCCTGTACGTGACATTCGAGCCTTGCGTGATGTGCGC
CG
GCGCCATGATCCACTCTAGGATCGGCCGCGTGGTGTTTGGCGTGAGGAACGCAAAAACCGGCGCCGCA
GG
CTCCCTGATGGACGTGCTGCACTACCCCGGCATGAATCACCGCGTCGAAATTACCGAGGGAATCCTGG
CA
GATGAATGTGCCGCCCTGCTGTGCTATTTCTTTCGGATGCCTAGACAGGTGTTCAATGCTCAGAAGAA
GG
CCCAGAGCTCCACCGACTCCGGAGGATCTAGCGGAGGCTCCTCTGGCTCTGAGACACCTGGCACAAGC
GA
GAGCGCAACACCTGAAAGCAGCGGGGGCAGCAGCGGGGGGTCAGACAAGAAGTACAGCATCGGCCTGG
CC
ATCGGCACCAACTCTGTGGGCTGGGCCGTGATCACCGACGAGTACAAGGTGCCCAGCAAGAAATTCAA
GG
TGCTGGGCAACACCGACCGGCACAGCATCAAGAAGAACCTGATCGGAGCCCTGCTGTTCGACAGCGGC
GA
AACAGCCGAGGCCACCCGGCTGAAGAGAACCGCCAGAAGAAGATACACCAGACGGAAGAACCGGATCT
GC
TATCTGCAAGAGATCTTCAGCAACGAGATGGCCAAGGTGGACGACAGCTTCTTCCACAGACTGGAAGA
GT
CCTTCCTGGTGGAAGAGGATAAGAAGCACGAGCGGCACCCCATCTTCGGCAACATCGTGGACGAGGTG
GC
CTACCACGAGAAGTACCCCACCATCTACCACCTGAGAAAGAAACTGGTGGACAGCACCGACAAGGCCG
AC
CTGCGGCTGATCTATCTGGCCCTGGCCCACATGATCAAGTTCCGGGGCCACTTCCTGATCGAGGGCGA
CC
TGAACCCCGACAACAGCGACGTGGACAAGCTGTTCATCCAGCTGGTGCAGACCTACAACCAGCTGTTC
GA
GGAAAACCCCATCAACGCCAGCGGCGTGGACGCCAAGGCCATCCTGTCTGCCAGACTGAGCAAGAGCA
GA
CGGCTGGAAAATCTGATCGCCCAGCTGCCCGGCGAGAAGAAGAATGGCCTGTTCGGAAACCTGATTGC
CC
TGAGCCTGGGCCTGACCCCCAACTTCAAGAGCAACTTCGACCTGGCCGAGGATGCCAAACTGCAGCTG
AG
CAAGGACACCTACGACGACGACCTGGACAACCTGCTGGCCCAGATCGGCGACCAGTACGCCGACCTGT
TT
CTGGCCGCCAAGAACCTGTCCGACGCCATCCTGCTGAGCGACATCCTGAGAGTGAACACCGAGATCAC
CA
AGGCCCCCCTGAGCGCCTCTATGATCAAGAGATACGACGAGCACCACCAGGACCTGACCCTGCTGAAA
GC
TCTCGTGCGGCAGCAGCTGCCTGAGAAGTACAAAGAGATTTTCTTCGACCAGAGCAAGAACGGCTACG
CC
GGCTACATTGACGGCGGAGCCAGCCAGGAAGAGTTCTACAAGTTCATCAAGCCCATCCTGGAAAAGAT
GG
ACGGCACCGAGGAACTGCTCGTGAAGCTGAACAGAGAGGACCTGCTGCGGAAGCAGCGGACCTTCGAC
AA
CGGCAGCATCCCCCACCAGATCCACCTGGGAGAGCTGCACGCCATTCTGCGGCGGCAGGAAGATTTTT
AC
CCATTCCTGAAGGACAACCGGGAAAAGATCGAGAAGATCCTGACCTTCCGCATCCCCTACTACGTGGG
CC
CTCTGGCCAGGGGAAACAGCAGATTCGCCTGGATGACCAGAAAGAGCGAGGAAACCATCACCCCCTGG
AA
CTTCGAGGAAGTGGTGGACAAGGGCGCTTCCGCCCAGAGCTTCATCGAGCGGATGACCAACTTCGATA
AG
AACCTGCCCAACGAGAAGGTGCTGCCCAAGCACAGCCTGCTGTACGAGTACTTCACCGTGTATAACGA
GC
TGACCAAAGTGAAATACGTGACCGAGGGAATGAGAAAGCCCGCCTTCCTGAGCGGCGAGCAGAAAAAG
GC
CATCGTGGACCTGCTGTTCAAGACCAACCGGAAAGTGACCGTGAAGCAGCTGAAAGAGGACTACTTCA
AG
AAAATCGAGTGCTTCGACTCCGTGGAAATCTCCGGCGTGGAAGATCGGTTCAACGCCTCCCTGGGCAC
AT
ACCACGATCTGCTGAAAATTATCAAGGACAAGGACTTCCTGGACAATGAGGAAAACGAGGACATTCTG
GA
AGATATCGTGCTGACCCTGACACTGTTTGAGGACAGAGAGATGATCGAGGAACGGCTGAAAACCTATG
CC
CACCTGTTCGACGACAAAGTGATGAAGCAGCTGAAGCGGCGGAGATACACCGGCTGGGGCAGGCTGAG
CC
GGAAGCTGATCAACGGCATCCGGGACAAGCAGTCCGGCAAGACAATCCTGGATTTCCTGAAGTCCGAC
GG
CTTCGCCAACAGAAACTTCATGCAGCTGATCCACGACGACAGCCTGACCTTTAAAGAGGACATCCAGA
AA
GCCCAGGTGTCCGGCCAGGGCGATAGCCTGCACGAGCACATTGCCAATCTGGCCGGCAGCCCCGCCAT
TA
AGAAGGGCATCCTGCAGACAGTGAAGGTGGTGGACGAGCTCGTGAAAGTGATGGGCCGGCACAAGCCC
GA
GAACATCGTGATCGAAATGGCCAGAGAGAACCAGACCACCCAGAAGGGACAGAAGAACAGCCGCGAGA
GA
ATGAAGCGGATCGAAGAGGGCATCAAAGAGCTGGGCAGCCAGATCCTGAAAGAACACCCCGTGGAAAA
CA
CCCAGCTGCAGAACGAGAAGCTGTACCTGTACTACCTGCAGAATGGGCGGGATATGTACGTGGACCAG
GA
ACTGGACATCAACCGGCTGTCCGACTACGATGTGGACCATATCGTGCCTCAGAGCTTTCTGAAGGACG
AC
TCCATCGACAACAAGGTGCTGACCAGAAGCGACAAGAACCGGGGCAAGAGCGACAACGTGCCCTCCGA
AG
AGGTCGTGAAGAAGATGAAGAACTACTGGCGGCAGCTGCTGAACGCCAAGCTGATTACCCAGAGAAAG
TT
CGACAATCTGACCAAGGCCGAGAGAGGCGGCCTGAGCGAACTGGATAAGGCCGGCTTCATCAAGAGAC
AG
CTGGTGGAAACCCGGCAGATCACAAAGCACGTGGCACAGATCCTGGACTCCCGGATGAACACTAAGTA
CG
ACGAGAATGACAAGCTGATCCGGGAAGTGAAAGTGATCACCCTGAAGTCCAAGCTGGTGTCCGATTTC
CG
GAAGGATTTCCAGTTTTACAAAGTGCGCGAGATCAACAACTACCACCACGCCCACGACGCCTACCTGA
AC
GCCGTCGTGGGAACCGCCCTGATCAAAAAGTACCCTAAGCTGGAAAGCGAGTTCGTGTACGGCGACTA
CA
AGGTGTACGACGTGCGGAAGATGATCGCCAAGAGCGAGCAGGAAATCGGCAAGGCTACCGCCAAGTAC
TT
CTTCTACAGCAACATCATGAACTTTTTCAAGACCGAGATTACCCTGGCCAACGGCGAGATCCGGAAGC
GG
CCTCTGATCGAGACAAACGGCGAAACCGGGGAGATCGTGTGGGATAAGGGCCGGGATTTTGCCACCGT
GC
GGAAAGTGCTGAGCATGCCCCAAGTGAATATCGTGAAAAAGACCGAGGTGCAGACAGGCGGCTTCAGC
AA
AGAGTCTATCCTGCCCAAGAGGAACAGCGATAAGCTGATCGCCAGAAAGAAGGACTGGGACCCTAAGA
AG
TACGGCGGCTTCGACAGCCCCACCGTGGCCTATTCTGTGCTGGTGGTGGCCAAAGTGGAAAAGGGCAA
GT
CCAAGAAACTGAAGAGTGTGAAAGAGCTGCTGGGGATCACCATCATGGAAAGAAGCAGCTTCGAGAAG
AA
TCCCATCGACTTTCTGGAAGCCAAGGGCTACAAAGAAGTGAAAAAGGACCTGATCATCAAGCTGCCTA
AG
TACTCCCTGTTCGAGCTGGAAAACGGCCGGAAGAGAATGCTGGCCTCTGCCGGCGAACTGCAGAAGGG
AA
ACGAACTGGCCCTGCCCTCCAAATATGTGAACTTCCTGTACCTGGCCAGCCACTATGAGAAGCTGAAG
GG
CTCCCCCGAGGATAATGAGCAGAAACAGCTGTTTGTGGAACAGCACAAGCACTACCTGGACGAGATCA
TC
GAGCAGATCAGCGAGTTCTCCAAGAGAGTGATCCTGGCCGACGCTAATCTGGACAAAGTGCTGTCCGC
CT
ACAACAAGCACCGGGATAAGCCCATCAGAGAGCAGGCCGAGAATATCATCCACCTGTTTACCCTGACC
AA
TCTGGGAGCCCCTGCCGCCTTCAAGTACTTTGACACCACCATCGACCGGAAGAGGTACACCAGCACCA
AA
GAGGTGCTGGACGCCACCCTGATCCACCAGAGCATCACCGGCCTGTACGAGACACGGATCGACCTGTC
TC
AGCTGGGAGGTGACTCTGGCGGCTCAAAAAGAACCGCCGACGGCAGCGAATTCGAGCCCAAGAAGAAG
AG
GAAAGTCTAACCGGTCATCATCACCATCACCATTGAGTTTAAACCCGCTGATCAGCCTCGACTGTGCC
TT
CTAGTTGCCAGCCATCTGTTGTTTGCCCCTCCCCCGTGCCTTCCTTGACCCTGGAAGGTGCCACTCCC
AC
TGTCCTTTCCTAATAAAATGAGGAAATTGCATCGCATTGTCTGAGTAGGTGTCATTCTATTCTGGGGG
GT
GGGGTGGGGCAGGACAGCAAGGGGGAGGATTGGGAAGACAATAGCAGGCATGCTGGGGATGCGGTGGG
CT
CTATGGCTTCTGAGGCGGAAAGAACCAGCTGGGGCTCGATACCGTCGACCTCTAGCTAGAGCTTGGCG
TA
ATCATGGTCATAGCTGTTTCCTGTGTGAAATTGTTATCCGCTCACAATTCCACACAACATACGAGCCG
GA
AGCATAAAGTGTAAAGCCTAGGGTGCCTAATGAGTGAGCTAACTCACATTAATTGCGTTGCGCTCACT
GC
CCGCTTTCCAGTCGGGAAACCTGTCGTGCCAGCTGCATTAATGAATCGGCCAACGCGCGGGGAGAGGC
GG
TTTGCGTATTGGGCGCTCTTCCGCTTCCTCGCTCACTGACTCGCTGCGCTCGGTCGTTCGGCTGCGGC
GA
GCGGTATCAGCTCACTCAAAGGCGGTAATACGGTTATCCACAGAATCAGGGGATAACGCAGGAAAGAA
CA
TGTGAGCAAAAGGCCAGCAAAAGGCCAGGAACCGTAAAAAGGCCGCGTTGCTGGCGTTTTTCCATAGG
CT
CCGCCCCCCTGACGAGCATCACAAAAATCGACGCTCAAGTCAGAGGTGGCGAAACCCGACAGGACTAT
AA
AGATACCAGGCGTTTCCCCCTGGAAGCTCCCTCGTGCGCTCTCCTGTTCCGACCCTGCCGCTTACCGG
AT
ACCTGTCCGCCTTTCTCCCTTCGGGAAGCGTGGCGCTTTCTCATAGCTCACGCTGTAGGTATCTCAGT
TC
GGTGTAGGTCGTTCGCTCCAAGCTGGGCTGTGTGCACGAACCCCCCGTTCAGCCCGACCGCTGCGCCT
TA
TCCGGTAACTATCGTCTTGAGTCCAACCCGGTAAGACACGACTTATCGCCACTGGCAGCAGCCACTGG
TA
ACAGGATTAGCAGAGCGAGGTATGTAGGCGGTGCTACAGAGTTCTTGAAGTGGTGGCCTAACTACGGC
TA
CACTAGAAGAACAGTATTTGGTATCTGCGCTCTGCTGAAGCCAGTTACCTTCGGAAAAAGAGTTGGTA
GC
TCTTGATCCGGCAPCAPACCACCGCTGGTAGCGGTGGTTTTTTTGTTTGCAPGCAGCAGATTACGCG
CA
GAAAAAAAGGATCTCAAGAAGATCCTTTGATCTTTTCTACGGGGTCTGACACTCAGTGGAACGAAAAC
TC
ACGTTAAGGGATTTTGGTCATGAGATTATCAAAAAGGATCTTCACCTAGATCCTTTTAAATTAAAAAT
GA
AGTTTTAAATCAATCTAAAGTATATATGAGTAAACTTGGTCTGACAGTTACCAATGCTTAATCAGTGA
GG
CACCTATCTCAGCGATCTGTCTATTTCGTTCATCCATAGTTGCCTGACTCCCCGTCGTGTAGATAACT
AC
GATACGGGAGGGCTTACCATCTGGCCCCAGTGCTGCAATGATACCGCGAGACCCACGCTCACCGGCTC
CA
GATTTATCAGCAATAAACCAGCCAGCCGGAAGGGCCGAGCGCAGAAGTGGTCCTGCAACTTTATCCGC
CT
CCATCCAGTCTATTAATTGTTGCCGGGAAGCTAGAGTAAGTAGTTCGCCAGTTAATAGTTTGCGCAAC
GT
TGTTGCCATTGCTACAGGCATCGTGGTGTCACGCTCGTCGTTTGGTATGGCTTCATTCAGCTCCGGTT
CC
CAACGATCAAGGCGAGTTACATGATCCCCCATGTTGTGCAAAAAAGCGGTTAGCTCCTTCGGTCCTCC
GA
TCGTTGTCAGAAGTAAGTTGGCCGCAGTGTTATCACTCATGGTTATGGCAGCACTGCATAATTCTCTT
AC
TGTCATGCCATCCGTAAGATGCTTTTCTGTGACTGGTGAGTACTCAACCAAGTCATTCTGAGAATAGT
GT
ATGCGGCGACCGAGTTGCTCTTGCCCGGCGTCAATACGGGATAATACCGCGCCACATAGCAGAACTTT
AA
AAGTGCTCATCATTGGAAAACGTTCTTCGGGGCGAAAACTCTCAAGGATCTTACCGCTGTTGAGATCC
AG
TTCGATGTAPCCCACTCGTGCACCCAPCTGATCTTCAGCATCTTTTACTTTCACCAGCGTTTCTGGGT
GA
GCAAAAACAGGAAGGCAAAATGCCGCAAAAAAGGGAATAAGGGCGACACGGAAATGTTGAATACTCAT
AC
TCTTCCTTTTTCAATATTATTGAAGCATTTATCAGGGTTATTGTCTCATGAGCGGATACATATTTGAA
TG
TATTTAGAAAAATAAACAAATAGGGGTTCCGCGCACATTTCCCCGAAAAGTGCCACCTGACGTCGACG
GA
TCGGGAGATCGATCTCCCGATCCCCTAGGGTCGACTCTCAGTACAATCTGCTCTGATGCCGCATAGTT
AA
GCCAGTATCTGCTCCCTGCTTGTGTGTTGGAGGTCGCTGAGTAGTGCGCGAGCAAAATTTAAGCTACA
AC
AAGGCAAGGCTTGACCGACAATTGCATGAAGAATCTGCTTAGGGTTAGGCGTTTTGCGCTGCTTCGCG
AT
GTACGGGCCAGATATACGCGTTGACATTGATTATTGACTAGTTATTAATAGTAATCAATTACGGGGTC
AT
TAGTTCATAGCCCATATATGGAGTTCCGCGTTACATAACTTACGGTAAATGGCCCGCCTGGCTGACCG
CC
CAACGACCCCCGCCCATTGACGTCAATAATGACGTATGTTCCCATAGTAACGCCAATAGGGACTTTCC
AT
TGACGTCAATGGGTGGAGTATTTACGGTAAACTGCCCACTTGGCAGTACATCAAGTGTATC

[0101] By “base editing activity” is meant acting to chemically alter a base within a polynucleotide. In one embodiment, a first base is converted to a second base. In one embodiment, the base editing activity is cytidine deaminase activity, e.g., converting target C⋅G to T⋅A. In another embodiment, the base editing activity is adenosine or adenine deaminase activity, e.g., converting A⋅T to G⋅C. In another embodiment, the base editing activity is cytidine deaminase activity, e.g., converting target C⋅G to T⋅A and adenosine or adenine deaminase activity, e.g., converting A⋅T to G⋅C. In some embodiments, base editing activity is assessed by efficiency of editing. Base editing efficiency may be measured by any suitable means, for example, by sanger sequencing or next generation sequencing. In some embodiments, base editing efficiency is measured by percentage of total sequencing reads with nucleobase conversion effected by the base editor, for example, percentage of total sequencing reads with target A.T base pair converted to a G.C base pair. In some embodiments, base editing efficiency is measured by percentage of total cells with nucleobase conversion effected by the base editor, when base editing is performed in a population of cells.

[0102] The term “base editor system” refers to a system for editing a nucleobase of a target nucleotide sequence. In various embodiments, the base editor system comprises (1) a polynucleotide programmable nucleotide binding domain (e.g., Cas9); (2) a deaminase domain (e.g., an adenosine deaminase or a cytidine deaminase) for deaminating said nucleobase; and (3) one or more guide polynucleotide (e.g., guide RNA). In some embodiments, the polynucleotide programmable nucleotide binding domain is a polynucleotide programmable DNA binding domain. In some embodiments, the base editor is an adenine or adenosine base editor (ABE). In some embodiments, the base editor system is ABE8.

[0103] In some embodiments, a base editor system may comprise more than one base editing component. For example, a base editor system may include more than one deaminase. In some embodiments, a base editor system may include one or more adenosine deaminases. In some embodiments, a single guide polynucleotide may be utilized to target different deaminases to a target nucleic acid sequence. In some embodiments, a single pair of guide polynucleotides may be utilized to target different deaminases to a target nucleic acid sequence.

[0104] The deaminase domain and the polynucleotide programmable nucleotide binding component of a base editor system may be associated with each other covalently or non-covalently, or any combination of associations and interactions thereof. For example, in some embodiments, a deaminase domain can be targeted to a target nucleotide sequence by a polynucleotide programmable nucleotide binding domain. In some embodiments, a polynucleotide programmable nucleotide binding domain can be fused or linked to a deaminase domain. In some embodiments, a polynucleotide programmable nucleotide binding domain can target a deaminase domain to a target nucleotide sequence by non-covalently interacting with or associating with the deaminase domain. For example, in some embodiments, the deaminase domain can comprise an additional heterologous portion or domain that is capable of interacting with, associating with, or capable of forming a complex with an additional heterologous portion or domain that is part of a polynucleotide programmable nucleotide binding domain. In some embodiments, the additional heterologous portion may be capable of binding to, interacting with, associating with, or forming a complex with a polypeptide. In some embodiments, the additional heterologous portion may be capable of binding to, interacting with, associating with, or forming a complex with a polynucleotide. In some embodiments, the additional heterologous portion may be capable of binding to a guide polynucleotide. In some embodiments, the additional heterologous portion may be capable of binding to a polypeptide linker. In some embodiments, the additional heterologous portion may be capable of binding to a polynucleotide linker. The additional heterologous portion may be a protein domain. In some embodiments, the additional heterologous portion may be a K Homology (KH) domain, a MS2 coat protein domain, a PP7 coat protein domain, a SfMu Com coat protein domain, a steril alpha motif, a telomerase Ku binding motif and Ku protein, a telomerase Sm7 binding motif and Sm7 protein, or an RNA recognition motif.

[0105] A base editor system may further comprise a guide polynucleotide component. It should be appreciated that components of the base editor system may be associated with each other via covalent bonds, noncovalent interactions, or any combination of associations and interactions thereof. In some embodiments, a deaminase domain can be targeted to a target nucleotide sequence by a guide polynucleotide. For example, in some embodiments, the deaminase domain can comprise an additional heterologous portion or domain (e.g., polynucleotide binding domain such as an RNA or DNA binding protein) that is capable of interacting with, associating with, or capable of forming a complex with a portion or segment (e.g., a polynucleotide motif) of a guide polynucleotide. In some embodiments, the additional heterologous portion or domain (e.g., polynucleotide binding domain such as an RNA or DNA binding protein) can be fused or linked to the deaminase domain. In some embodiments, the additional heterologous portion may be capable of binding to, interacting with, associating with, or forming a complex with a polypeptide. In some embodiments, the additional heterologous portion may be capable of binding to, interacting with, associating with, or forming a complex with a polynucleotide. In some embodiments, the additional heterologous portion may be capable of binding to a guide polynucleotide. In some embodiments, the additional heterologous portion may be capable of binding to a polypeptide linker. In some embodiments, the additional heterologous portion may be capable of binding to a polynucleotide linker. The additional heterologous portion may be a protein domain. In some embodiments, the additional heterologous portion may be a K Homology (KH) domain, a MS2 coat protein domain, a PP7 coat protein domain, a SfMu Com coat protein domain, a sterile alpha motif, a telomerase Ku binding motif and Ku protein, a telomerase Sm7 binding motif and Sm7 protein, or an RNA recognition motif.

[0106] In some embodiments, a base editor system can further comprise an inhibitor of base excision repair (BER) component. It should be appreciated that components of the base editor system may be associated with each other via covalent bonds, noncovalent interactions, or any combination of associations and interactions thereof. The inhibitor of BER component may comprise a BER inhibitor. In some embodiments, the inhibitor of BER can be a uracil DNA glycosylase inhibitor (UGI). In some embodiments, the inhibitor of BER can be an inosine BER inhibitor. In some embodiments, the inhibitor of BER can be targeted to the target nucleotide sequence by the polynucleotide programmable nucleotide binding domain. In some embodiments, a polynucleotide programmable nucleotide binding domain can be fused or linked to an inhibitor of BER. In some embodiments, a polynucleotide programmable nucleotide binding domain can be fused or linked to a deaminase domain and an inhibitor of BER. In some embodiments, a polynucleotide programmable nucleotide binding domain can target an inhibitor of BER to a target nucleotide sequence by non-covalently interacting with or associating with the inhibitor of BER. For example, in some embodiments, the inhibitor of BER component can comprise an additional heterologous portion or domain that is capable of interacting with, associating with, or capable of forming a complex with an additional heterologous portion or domain that is part of a polynucleotide programmable nucleotide binding domain.

[0107] In some embodiments, the inhibitor of BER can be targeted to the target nucleotide sequence by the guide polynucleotide. For example, in some embodiments, the inhibitor of BER can comprise an additional heterologous portion or domain (e.g., polynucleotide binding domain such as an RNA or DNA binding protein) that is capable of interacting with, associating with, or capable of forming a complex with a portion or segment (e.g., a polynucleotide motif) of a guide polynucleotide. In some embodiments, the additional heterologous portion or domain of the guide polynucleotide (e.g., polynucleotide binding domain such as an RNA or DNA binding protein) can be fused or linked to the inhibitor of BER. In some embodiments, the additional heterologous portion may be capable of binding to, interacting with, associating with, or forming a complex with a polynucleotide. In some embodiments, the additional heterologous portion may be capable of binding to a guide polynucleotide. In some embodiments, the additional heterologous portion may be capable of binding to a polypeptide linker. In some embodiments, the additional heterologous portion may be capable of binding to a polynucleotide linker. The additional heterologous portion may be a protein domain. In some embodiments, the additional heterologous portion may be a K Homology (KH) domain, a MS2 coat protein domain, a PP7 coat protein domain, a SfMu Com coat protein domain, a sterile alpha motif, a telomerase Ku binding motif and Ku protein, a telomerase Sm7 binding motif and Sm7 protein, or an RNA recognition motif.

[0108] The term “Cas9” or “Cas9 domain” refers to an RNA guided nuclease comprising a Cas9 protein, or a fragment thereof (e.g., a protein comprising an active, inactive, or partially active DNA cleavage domain of Cas9, and/or the gRNA binding domain of Cas9). A Cas9 nuclease is also referred to sometimes as a Casnl nuclease or a CRISPR (clustered regularly interspaced short palindromic repeat) associated nuclease. CRISPR is an adaptive immune system that provides protection against mobile genetic elements (viruses, transposable elements and conjugative plasmids). CRISPR clusters contain spacers, sequences complementary to antecedent mobile elements, and target invading nucleic acids. CRISPR clusters are transcribed and processed into CRISPR RNA (crRNA). In type II CRISPR systems correct processing of pre-crRNA requires a trans-encoded small RNA (tracrRNA), endogenous ribonuclease 3 (rnc) and a Cas9 protein. The tracrRNA serves as a guide for ribonuclease 3-aided processing of pre-crRNA. Subsequently, Cas9/crRNA/tracrRNA endonucleolytically cleaves linear or circular dsDNA target complementary to the spacer. The target strand not complementary to crRNA is first cut endonucleolytically, then trimmed 3′-5′ exonucleolytically. In nature, DNA-binding and cleavage typically requires protein and both RNAs. However, single guide RNAs (“sgRNA”, or simply “gNRA”) can be engineered so as to incorporate aspects of both the crRNA and tracrRNA into a single RNA species. See, e.g., Jinek M., et al., Science 337:816-821(2012), the entire contents of which is hereby incorporated by reference. Cas9 recognizes a short motif in the CRISPR repeat sequences (the PAM or protospacer adjacent motif) to help distinguish self versus non-self. Cas9 nuclease sequences and structures are well known to those of skill in the art (see, e.g., “Complete genome sequence of an M1 strain of Streptococcus pyogenes.” Ferretti et al., Proc. Natl. Acad. Sci. U.S.A. 98:4658-4663(2001); “CRISPR RNA maturation by trans-encoded small RNA and host factor RNase III.” Deltcheva E., et al., Nature 471:602-607(2011); and “A programmable dual-RNA-guided DNA endonuclease in adaptive bacterial immunity.” Jinek M., et al., Science 337:816-821(2012), the entire contents of each of which are incorporated herein by reference). Cas9 orthologs have been described in various species, including, but not limited to, S. pyogenes and S. thermophilus. Additional suitable Cas9 nucleases and sequences will be apparent to those of skill in the art based on this disclosure, and such Cas9 nucleases and sequences include Cas9 sequences from the organisms and loci disclosed in Chylinski, Rhun, and Charpentier, “The tracrRNA and Cas9 families of type II CRISPR-Cas immunity systems” (2013) RNA Biology 10:5, 726-737; the entire contents of which are incorporated herein by reference.

[0109] An exemplary Cas9, is Streptococcus pyogenes Cas9 (spCas9), the amino acid sequence of which is provided below:

MDKKYSIGLDIGTNSVGWAVITDDYKVPSKKFKVLGNTDRHSIKKNLIGALLFGSGETAEAT
RLKRTARRRYTRRKNRICYLQEIFSNEMAKVDDSFFHRLEESFLVEEDKKHERHPIFGNIVD
EVAYHEKYPTIYHLRKKLADSTDKADLRLIYLALAHMIKFRGHFLIEGDLNPDNSDVDKLFI
QLVQIYNQLFEENPINASRVDAKAILSARLSKSRRLENLIAQLPGEKRNGLFGNLIALSLGL
TPNFKSNFDLAEDAKLQLSKDTYDDDLDNLLAQIGDQYADLFLAAKNLSDAILLSDILRVNS
EITKAPLSASMIKRYDEHHQDLTLLKALVRQQLPEKYKEIFFDQSKNGYAGYIDGGASQEEF
YKFIKPILEKMDGTEELLVKLNREDLLRKQRTFDNGSIPHQIHLGELHAILRRQEDFYPFLK
DNREKIEKILTFRIPYYVGPLARGNSRFAWMTRKSEETITPWNFEEVVDKGASAQSFIERMT
NFDKNLPNEKVLPKHSLLYEYFTVYNELTKVKYVTEGMRKPAFLSGEQKKAIVDLLFKTNRK
VTVKQLKEDYFKKIECFDSVEISGVEDRFNASLGAYHDLLKIIKDKDFLDNEENEDILEDIV
LTLTLFEDRGMIEERLKTYAHLFDDKVMKQLKRRRYTGWGRLSRKLINGIRDKQSGKTILDF
LKSDGFANRNFMQLIHDDSLTFKEDIQKAQVSGQGHSLHEQIANLAGSPAIKKGILQTVKIV
DELVKVMGHKPENIVIEMARENQTTQKGQKNSRERMKRIEEGIKELGSQILKEHPVENTQLQ
NEKLYLYYLQNGRDMYVDQELDINRLSDYDVDHIVPQSFIKDDSIDNKVLTRSDKNRGKSDN
VPSEEVVKKMKNYWRQLLNAKLITQRKFDNLTKAERGGLSELDKAGFIKRQLVETRQITKHV
AQILDSRMNTKYDENDKLIREVKVITLKSKLVSDFRKDFQFYKVREINNYHHAHDAYLNAVV
GTALIKKYPKLESEFVYGDYKVYDVRKMIAKSEQEIGKATAKYFFYSNIMNFFKTEITLANG
EIRKRPLIETNGETGEIVWDKGRDFATVRKVLSMPQVNIVKKTEVQTGGFSKESILPKRNSD
KLIARKKDWDPKKYGGFDSPTVAYSVLVVAKVEKGKSKKLKSVKELLGITIMERSSFEKNPI
DFLEAKGYKEVKKDLIIKLPKYSLFELENGRKRMLASAGELQKGNELALPSKYVNFLYLASH
YEKLKGSPEDNEQKQLFVEQHKHYLDEIIEQISEFSKRVILADANLDKVLSAYNKHRDKPIR
EQAENIIHLFTLTNLGAPAAFKYFDTTIDRKRYTSTKEVLDATLIHQSITGLYETRIDLSQL
GGD

(single underline: HNH domain; double underline: RuvC domain)

[0110] A nuclease-inactivated Cas9 protein may interchangeably be referred to as a “dCas9” protein (for nuclease-“dead” Cas9) or catalytically inactive Cas9. Methods for generating a Cas9 protein (or a fragment thereof) having an inactive DNA cleavage domain are known (See, e.g., Jinek et al., Science. 337:816-821(2012); Qi et al., “Repurposing CRISPR as an RNA-Guided Platform for Sequence-Specific Control of Gene Expression” (2013) Cell. 28; 152(5):1173-83, the entire contents of each of which are incorporated herein by reference). For example, the DNA cleavage domain of Cas9 is known to include two subdomains, the HNH nuclease subdomain and the RuvC1 subdomain. The HNH subdomain cleaves the strand complementary to the gRNA, whereas the RuvC1 subdomain cleaves the non-complementary strand. Mutations within these subdomains can silence the nuclease activity of Cas9. For example, the mutations D10A and H840A completely inactivate the nuclease activity of S. pyogenes Cas9 (Jinek et al., Science. 337:816-821(2012); Qi et al., Cell. 28; 152(5):1173-83 (2013)). In some embodiments, a Cas9 nuclease has an inactive (e.g., an inactivated) DNA cleavage domain, that is, the Cas9 is a nickase, referred to as an “nCas9” protein (for “nickase” Cas9). In some embodiments, proteins comprising fragments of Cas9 are provided. For example, in some embodiments, a protein comprises one of two Cas9 domains: (1) the gRNA binding domain of Cas9; or (2) the DNA cleavage domain of Cas9. In some embodiments, proteins comprising Cas9 or fragments thereof are referred to as “Cas9 variants.” A Cas9 variant shares homology to Cas9, or a fragment thereof. For example, a Cas9 variant is at least about 70% identical, at least about 80% identical, at least about 90% identical, at least about 95% identical, at least about 96% identical, at least about 97% identical, at least about 98% identical, at least about 99% identical, at least about 99.5% identical, or at least about 99.9% identical to wild-type Cas9. In some embodiments, the Cas9 variant may have 1, 2, 3, 4, 5, 6, 7, 8, 9, 10, 11, 12, 13, 14, 15, 16, 17, 18, 19, 20, 21, 22, 21, 24, 25, 26, 27, 28, 29, 30, 31, 32, 33, 34, 35, 36, 37, 38, 39, 40, 41, 42, 43, 44, 45, 46, 47, 48, 49, 50 or more amino acid changes compared to wild-type Cas9. In some embodiments, the Cas9 variant comprises a fragment of Cas9 (e.g., a gRNA binding domain or a DNA-cleavage domain), such that the fragment is at least about 70% identical, at least about 80% identical, at least about 90% identical, at least about 95% identical, at least about 96% identical, at least about 97% identical, at least about 98% identical, at least about 99% identical, at least about 99.5% identical, or at least about 99.9% identical to the corresponding fragment of wild-type Cas9. In some embodiments, the fragment is at least 30%, at least 35%, at least 40%, at least 45%, at least 50%, at least 55%, at least 60%, at least 65%, at least 70%, at least 75%, at least 80%, at least 85%, at least 90%, at least 95% identical, at least 96%, at least 97%, at least 98%, at least 99%, or at least 99.5% of the amino acid length of a corresponding wild-type Cas9.

[0111] In some embodiments, the fragment is at least 100 amino acids in length. In some embodiments, the fragment is at least 100, 150, 200, 250, 300, 350, 400, 450, 500, 550, 600, 650, 700, 750, 800, 850, 900, 950, 1000, 1050, 1100, 1150, 1200, 1250, or at least 1300 amino acids in length.

[0112] In some embodiments, wild-type Cas9 corresponds to Cas9 from Streptococcus pyogenes (NCBI Reference Sequence: NC_017053.1, nucleotide and amino acid sequences as follows).

ATGGATAAGAAATACTCAATAGGCTTAGATATCGGCACAAATAGCGTCGGATGGGCGGTGAT
CACTGATGATTATAAGGTTCCGTCTAAAAAGTTCAAGGTTCTGGGAAATACAGACCGCCACA
GTATCAAAAAAAATCTTATAGGGGCTCTTTTATTTGGCAGTGGAGAGACAGCGGAAGCGACT
CGTCTCAAACGGACAGCTCGTAGAAGGTATACACGTCGGAAGAATCGTATTTGTTATCTACA
GGAGATTTTTTCAAATGAGATGGCGAAAGTAGATGATAGTTTCTTTCATCGACTTGAAGAGT
CTTTTTTGGTGGAAGAAGACAAGAAGCATGAACGTCATCCTATTTTTGGAAATATAGTAGAT
GAAGTTGCTTATCATGAGAAATATCCAACTATCTATCATCTGCGAAAAAAATTGGCAGATTC
TACTGATAAAGCGGATTTGCGCTTAATCTATTTGGCCTTAGCGCATATGATTAAGTTTCGTG
GTCATTTTTTGATTGAGGGAGATTTAAATCCTGATAATAGTGATGTGGACAAACTATTTATC
CAGTTGGTACAAATCTACAATCAATTATTTGAAGAAAACCCTATTAACGCAAGTAGAGTAGA
TGCTAAAGCGATTCTTTCTGCACGATTGAGTAAATCAAGACGATTAGAAAATCTCATTGCTC
AGCTCCCCGGTGAGAAGAGAAATGGCTTGTTTGGGAATCTCATTGCTTTGTCATTGGGATTG
ACCCCTAATTTTAAATCAAATTTTGATTTGGCAGAAGATGCTAAATTACAGCTTTCAAAAGA
TACTTACGATGATGATTTAGATAATTTATTGGCGCAAATTGGAGATCAATATGCTGATTTGT
TTTTGGCAGCTAAGAATTTATCAGATGCTATTTTACTTTCAGATATCCTAAGAGTAAATAGT
GAAATAACTAAGGCTCCCCTATCAGCTTCAATGATTAAGCGCTACGATGAACATCATCAAGA
CTTGACTCTTTTAAAAGCTTTAGTTCGACAACAACTTCCAGAAAAGTATAAAGAAATCTTTT
TTGATCAATCAAAAAACGGATATGCAGGTTATATTGATGGGGGAGCTAGCCAAGAAGAATTT
TATAAATTTATCAAACCAATTTTAGAAAAAATGGATGGTACTGAGGAATTATTGGTGAAACT
AAATCGTGAAGATTTGCTGCGCAAGCAACGGACCTTTGACAACGGCTCTATTCCCCATCAAA
TTCACTTGGGTGAGCTGCATGCTATTTTGAGAAGACAAGAAGACTTTTATCCATTTTTAAAA
GACAATCGTGAGAAGATTGAAAAAATCTTGACTTTTCGAATTCCTTATTATGTTGGTCCATT
GGCGCGTGGCAATAGTCGTTTTGCATGGATGACTCGGAAGTCTGAAGAAACAATTACCCCAT
GGAATTTTGAAGAAGTTGTCGATAAAGGTGCTTCAGCTCAATCATTTATTGAACGCATGACA
AACTTTGATAAAAATCTTCCAAATGAAAAAGTACTACCAAAACATAGTTTGCTTTATGAGTA
TTTTACGGTTTATAACGAATTGACAAAGGTCAAATATGTTACTGAGGGAATGCGAAAACCAG
CATTTCTTTCAGGTGAACAGAAGAAAGCCATTGTTGATTTACTCTTCAAAACAAATCGAAAA
GTAACCGTTAAGCAATTAAAAGAAGATTATTTCAAAAAAATAGAATGTTTTGATAGTGTTGA
AATTTCAGGAGTTGAAGATAGATTTAATGCTTCATTAGGCGCCTACCATGATTTGCTAAAAA
TTATTAAAGATAAAGATTTTTTGGATAATGAAGAAAATGAAGATATCTTAGAGGATATTGTT
TTAACATTGACCTTATTTGAAGATAGGGGGATGATTGAGGAAAGACTTAAAACATATGCTCA
CCTCTTTGATGATAAGGTGATGAAACAGCTTAAACGTCGCCGTTATACTGGTTGGGGACGTT
TGTCTCGAAAATTGATTAATGGTATTAGGGATAAGCAATCTGGCAAAACAATATTAGATTTT
TTGAAATCAGATGGTTTTGCCAATCGCAATTTTATGCAGCTGATCCATGATGATAGTTTGAC
ATTTAAAGAAGATATTCAAAAAGCACAGGTGTCTGGACAAGGCCATAGTTTACATGAACAGA
TTGCTAACTTAGCTGGCAGTCCTGCTATTAAAAAAGGTATTTTACAGACTGTAAAAATTGTT
GATGAACTGGTCAAAGTAATGGGGCATAAGCCAGAAAATATCGTTATTGAAATGGCACGTGA
AAATCAGACAACTCAAAAGGGCCAGAAAAATTCGCGAGAGCGTATGAAACGAATCGAAGAAG
GTATCAAAGAATTAGGAAGTCAGATTCTTAAAGAGCATCCTGTTGAAAATACTCAATTGCAA
AATGAAAAGCTCTATCTCTATTATCTACAAAATGGAAGAGACATGTATGTGGACCAAGAATT
AGATATTAATCGTTTAAGTGATTATGATGTCGATCACATTGTTCCACAAAGTTTCATTAAAG
ACGATTCAATAGACAATAAGGTACTAACGCGTTCTGATAAAAATCGTGGTAAATCGGATAAC
GTTCCAAGTGAAGAAGTAGTCAAAAAGATGAAAAACTATTGGAGACAACTTCTAAACGCCAA
GTTAATCACTCAACGTAAGTTTGATAATTTAACGAAAGCTGAACGTGGAGGTTTGAGTGAAC
TTGATAAAGCTGGTTTTATCAAACGCCAATTGGTTGAAACTCGCCAAATCACTAAGCATGTG
GCACAAATTTTGGATAGTCGCATGAATACTAAATACGATGAAAATGATAAACTTATTCGAGA
GGTTAAAGTGATTACCTTAAAATCTAAATTAGTTTCTGACTTCCGAAAAGATTTCCAATTCT
ATAAAGTACGTGAGATTAACAATTACCATCATGCCCATGATGCGTATCTAAATGCCGTCGTT
GGAACTGCTTTGATTAAGAAATATCCAAAACTTGAATCGGAGTTTGTCTATGGTGATTATAA
AGTTTATGATGTTCGTAAAATGATTGCTAAGTCTGAGCAAGAAATAGGCAAAGCAACCGCAA
AATATTTCTTTTACTCTAATATCATGAACTTCTTCAAAACAGAAATTACACTTGCAAATGGA
GAGATTCGCAAACGCCCTCTAATCGAAACTAATGGGGAAACTGGAGAAATTGTCTGGGATAA
AGGGCGAGATTTTGCCACAGTGCGCAAAGTATTGTCCATGCCCCAAGTCAATATTGTCAAGA
AAACAGAAGTACAGACAGGCGGATTCTCCAAGGAGTCAATTTTACCAAAAAGAAATTCGGAC
AAGCTTATTGCTCGTAAAAAAGACTGGGATCCAAAAAAATATGGTGGTTTTGATAGTCCAAC
GGTAGCTTATTCAGTCCTAGTGGTTGCTAAGGTGGAAAAAGGGAAATCGAAGAAGTTAAAAT
CCGTTAAAGAGTTACTAGGGATCACAATTATGGAAAGAAGTTCCTTTGAAAAAAATCCGATT
GACTTTTTAGAAGCTAAAGGATATAAGGAAGTTAAAAAAGACTTAATCATTAAACTACCTAA
ATATAGTCTTTTTGAGTTAGAAAACGGTCGTAAACGGATGCTGGCTAGTGCCGGAGAATTAC
AAAAAGGAAATGAGCTGGCTCTGCCAAGCAAATATGTGAATTTTTTATATTTAGCTAGTCAT
TATGAAAAGTTGAAGGGTAGTCCAGAAGATAACGAACAAAAACAATTGTTTGTGGAGCAGCA
TAAGCATTATTTAGATGAGATTATTGAGCAAATCAGTGAATTTTCTAAGCGTGTTATTTTAG
CAGATGCCAATTTAGATAAAGTTCTTAGTGCATATAACAAACATAGAGACAAACCAATACGT
GAACAAGCAGAAAATATTATTCATTTATTTACGTTGACGAATCTTGGAGCTCCCGCTGCTTT
TAAATATTTTGATACAACAATTGATCGTAAACGATATACGTCTACAAAAGAAGTTTTAGATG
CCACTCTTATCCATCAATCCATCACTGGTCTTTATGAAACACGCATTGATTTGAGTCAGCTA
GGAGGTGACTGA
MDKKYSIGLDIGTNSVGWAVITDDYKVPSKKFKVLGNTDRHSIKKNLIGALLFGSGETAEAT
RLKRTARRRYTRRKNRICYLQEIFSNEMAKVDDSFFHRLEESFLVEEDKKHERHPIFGNIVD
EVAYHEKYPTIYHLRKKLADSTDKADLRLIYLALAHMIKFRGHFLIEGDLNPDNSDVDKLFI
QLVQIYNQLFEENPINASRVDAKAILSARLSKSRRLENLIAQLPGEKRNGLFGNLIALSLGL
TPNFKSNFDLAEDAKLQLSKDTYDDDLDNLLAQIGDQYADLFLAAKNLSDAILLSDILRVNS
EITKAPLSASMIKRYDEHHQDLTLLKALVRQQLPEKYKEIFFDQSKNGYAGYIDGGASQEEF
YKFIKPILEKMDGTEELLVKLNREDLLRKQRTFDNGSIPHQIHLGELHAILRRQEDFYPFLK
DNREKIEKILTFRIPYYVGPLARGNSRFAWMTRKSEETITPWNFEEVVDKGASAQSFIERMT
NFDKNLPNEKVLPKHSLLYEYFTVYNELTKVKYVTEGMRKPAFLSGEQKKAIVDLLFKTNRK
VTVKQLKEDYFKKIECFDSVEISGVEDRFNASLGAYHDLLKIIKDKDFLDNEENEDILEDIV
LTLTLFEDRGMIEERLKTYAHLFDDKVMKQLKRRRYTGWGRLSRKLINGIRDKQSGKTILDF
LKSDGFANRNFMQLIHDDSLTFKEDIQKAQVSGQGHSLHEQIANLAGSPAIKKGILQTVKIV
DELVKVMGHKPENIVIEMARENQTTQKGQKNSRERMKRIEEGIKELGSQILKEHPVENTQLQ
NEKLYLYYLQNGRDMYVDQELDINRLSDYDVDHIVPQSFIKDDSIDNKVLTRSDKNRGKSDN
VPSEEVVKKMKNYWRQLLNAKLITQRKFDNLTKAERGGLSELDKAGFIKRQLVETRQITKHV
AQILDSRMNTKYDENDKLIREVKVITLKSKLVSDFRKDFQFYKVREINNYHHAHDAYLNAVV
GTALIKKYPKLESEFVYGDYKVYDVRKMIAKSEQEIGKATAKYFFYSNIMNFFKTEITLANG
EIRKRPLIETNGETGEIVWDKGRDFATVRKVLSMPQVNIVKKTEVQTGGFSKESILPKRNSD
KLIARKKDWDPKKYGGFDSPTVAYSVLVVAKVEKGKSKKLKSVKELLGITIMERSSFEKNPI
DFLEAKGYKEVKKDLIIKLPKYSLFELENGRKRMLASAGELQKGNELALPSKYVNFLYLASH
YEKLKGSPEDNEQKQLFVEQHKHYLDEIIEQISEFSKRVILADANLDKVLSAYNKHRDKPIR
EQAENIIHLFTLTNLGAPAAFKYFDTTIDRKRYTSTKEVLDATLIHQSITGLYETRIDLSQL
GGD

(single underline: HNH domain; double underline: RuvC domain)

[0113] In some embodiments, wild-type Cas9 corresponds to, or comprises the following nucleotide and/or amino acid sequences:

ATGGATAAAAAGTATTCTATTGGTTTAGACATCGGCACTAATTCCGTTGGATGGGCTGTCAT
AACCGATGAATACAAAGTACCTTCAAAGAAATTTAAGGTGTTGGGGAACACAGACCGTCATT
CGATTAAAAAGAATCTTATCGGTGCCCTCCTATTCGATAGTGGCGAAACGGCAGAGGCGACT
CGCCTGAAACGAACCGCTCGGAGAAGGTATACACGTCGCAAGAACCGAATATGTTACTTACA
AGAAATTTTTAGCAATGAGATGGCCAAAGTTGACGATTCTTTCTTTCACCGTTTGGAAGAGT
CCTTCCTTGTCGAAGAGGACAAGAAACATGAACGGCACCCCATCTTTGGAAACATAGTAGAT
GAGGTGGCATATCATGAAAAGTACCCAACGATTTATCACCTCAGAAAAAAGCTAGTTGACTC
AACTGATAAAGCGGACCTGAGGTTAATCTACTTGGCTCTTGCCCATATGATAAAGTTCCGTG
GGCACTTTCTCATTGAGGGTGATCTAAATCCGGACAACTCGGATGTCGACAAACTGTTCATC
CAGTTAGTACAAACCTATAATCAGTTGTTTGAAGAGAACCCTATAAATGCAAGTGGCGTGGA
TGCGAAGGCTATTCTTAGCGCCCGCCTCTCTAAATCCCGACGGCTAGAAAACCTGATCGCAC
AATTACCCGGAGAGAAGAAAAATGGGTTGTTCGGTAACCTTATAGCGCTCTCACTAGGCCTG
ACACCAAATTTTAAGTCGAACTTCGACTTAGCTGAAGATGCCAAATTGCAGCTTAGTAAGGA
CACGTACGATGACGATCTCGACAATCTACTGGCACAAATTGGAGATCAGTATGCGGACTTAT
TTTTGGCTGCCAAAAACCTTAGCGATGCAATCCTCCTATCTGACATACTGAGAGTTAATACT
GAGATTACCAAGGCGCCGTTATCCGCTTCAATGATCAAAAGGTACGATGAACATCACCAAGA
CTTGACACTTCTCAAGGCCCTAGTCCGTCAGCAACTGCCTGAGAAATATAAGGAAATATTCT
TTGATCAGTCGAAAAACGGGTACGCAGGTTATATTGACGGCGGAGCGAGTCAAGAGGAATTC
TACAAGTTTATCAAACCCATATTAGAGAAGATGGATGGGACGGAAGAGTTGCTTGTAAAACT
CAATCGCGAAGATCTACTGCGAAAGCAGCGGACTTTCGACAACGGTAGCATTCCACATCAAA
TCCACTTAGGCGAATTGCATGCTATACTTAGAAGGCAGGAGGATTTTTATCCGTTCCTCAAA
GACAATCGTGAAAAGATTGAGAAAATCCTAACCTTTCGCATACCTTACTATGTGGGACCCCT
GGCCCGAGGGAACTCTCGGTTCGCATGGATGACAAGAAAGTCCGAAGAAACGATTACTCCAT
GGAATTTTGAGGAAGTTGTCGATAAAGGTGCGTCAGCTCAATCGTTCATCGAGAGGATGACC
AACTTTGACAAGAATTTACCGAACGAAAAAGTATTGCCTAAGCACAGTTTACTTTACGAGTA
TTTCACAGTGTACAATGAACTCACGAAAGTTAAGTATGTCACTGAGGGCATGCGTAAACCCG
CCTTTCTAAGCGGAGAACAGAAGAAAGCAATAGTAGATCTGTTATTCAAGACCAACCGCAAA
GTGACAGTTAAGCAATTGAAAGAGGACTACTTTAAGAAAATTGAATGCTTCGATTCTGTCGA
GATCTCCGGGGTAGAAGATCGATTTAATGCGTCACTTGGTACGTATCATGACCTCCTAAAGA
TAATTAAAGATAAGGACTTCCTGGATAACGAAGAGAATGAAGATATCTTAGAAGATATAGTG
TTGACTCTTACCCTCTTTGAAGATCGGGAAATGATTGAGGAAAGACTAAAAACATACGCTCA
CCTGTTCGACGATAAGGTTATGAAACAGTTAAAGAGGCGTCGCTATACGGGCTGGGGACGAT
TGTCGCGGAAACTTATCAACGGGATAAGAGACAAGCAAAGTGGTAAAACTATTCTCGATTTT
CTAAAGAGCGACGGCTTCGCCAATAGGAACTTTATGCAGCTGATCCATGATGACTCTTTAAC
CTTCAAAGAGGATATACAAAAGGCACAGGTTTCCGGACAAGGGGACTCATTGCACGAACATA
TTGCGAATCTTGCTGGTTCGCCAGCCATCAAAAAGGGCATACTCCAGACAGTCAAAGTAGTG
GATGAGCTAGTTAAGGTCATGGGACGTCACAAACCGGAAAACATTGTAATCGAGATGGCACG
CGAAAATCAAACGACTCAGAAGGGGCAAAAAAACAGTCGAGAGCGGATGAAGAGAATAGAAG
AGGGTATTAAAGAACTGGGCAGCCAGATCTTAAAGGAGCATCCTGTGGAAAATACCCAATTG
CAGAACGAGAAACTTTACCTCTATTACCTACAAAATGGAAGGGACATGTATGTTGATCAGGA
ACTGGACATAAACCGTTTATCTGATTACGACGTCGATCACATTGTACCCCAATCCTTTTTGA
AGGACGATTCAATCGACAATAAAGTGCTTACACGCTCGGATAAGAACCGAGGGAAAAGTGAC
AATGTTCCAAGCGAGGAAGTCGTAAAGAAAATGAAGAACTATTGGCGGCAGCTCCTAAATGC
GAAACTGATAACGCAAAGAAAGTTCGATAACTTAACTAAAGCTGAGAGGGGTGGCTTGTCTG
AACTTGACAAGGCCGGATTTATTAAACGTCAGCTCGTGGAAACCCGCCAAATCACAAAGCAT
GTTGCACAGATACTAGATTCCCGAATGAATACGAAATACGACGAGAACGATAAGCTGATTCG
GGAAGTCAAAGTAATCACTTTAAAGTCAAAATTGGTGTCGGACTTCAGAAAGGATTTTCAAT
TCTATAAAGTTAGGGAGATAAATAACTACCACCATGCGCACGACGCTTATCTTAATGCCGTC
GTAGGGACCGCACTCATTAAGAAATACCCGAAGCTAGAAAGTGAGTTTGTGTATGGTGATTA
CAAAGTTTATGACGTCCGTAAGATGATCGCGAAAAGCGAACAGGAGATAGGCAAGGCTACAG
CCAAATACTTCTTTTATTCTAACATTATGAATTTCTTTAAGACGGAAATCACTCTGGCAAAC
GGAGAGATACGCAAACGACCTTTAATTGAAACCAATGGGGAGACAGGTGAAATCGTATGGGA
TAAGGGCCGGGACTTCGCGACGGTGAGAAAAGTTTTGTCCATGCCCCAAGTCAACATAGTAA
AGAAAACTGAGGTGCAGACCGGAGGGTTTTCAAAGGAATCGATTCTTCCAAAAAGGAATAGT
GATAAGCTCATCGCTCGTAAAAAGGACTGGGACCCGAAAAAGTACGGTGGCTTCGATAGCCC
TACAGTTGCCTATTCTGTCCTAGTAGTGGCAAAAGTTGAGAAGGGAAAATCCAAGAAACTGA
AGTCAGTCAAAGAATTATTGGGGATAACGATTATGGAGCGCTCGTCTTTTGAAAAGAACCCC
ATCGACTTCCTTGAGGCGAAAGGTTACAAGGAAGTAAAAAAGGATCTCATAATTAAACTACC
AAAGTATAGTCTGTTTGAGTTAGAAAATGGCCGAAAACGGATGTTGGCTAGCGCCGGAGAGC
TTCAAAAGGGGAACGAACTCGCACTACCGTCTAAATACGTGAATTTCCTGTATTTAGCGTCC
CATTACGAGAAGTTGAAAGGTTCACCTGAAGATAACGAACAGAAGCAACTTTTTGTTGAGCA
GCACAAACATTATCTCGACGAAATCATAGAGCAAATTTCGGAATTCAGTAAGAGAGTCATCC
TAGCTGATGCCAATCTGGACAAAGTATTAAGCGCATACAACAAGCACAGGGATAAACCCATA
CGTGAGCAGGCGGAAAATATTATCCATTTGTTTACTCTTACCAACCTCGGCGCTCCAGCCGC
ATTCAAGTATTTTGACACAACGATAGATCGCAAACGATACACTTCTACCAAGGAGGTGCTAG
ACGCGACACTGATTCACCAATCCATCACGGGATTATATGAAACTCGGATAGATTTGTCACAG
CTTGGGGGTGACGGATCCCCCAAGAAGAAGAGGAAAGTCTCGAGCGACTACAAAGACCATGA
CGGTGATTATAAAGATCATGACATCGATTACAAGGATGACGATGACAAGGCTGCAGGA
MDKKYSIGLDIGTNSVGWAVITDEYKVPSKKFKVLGNTDRHSIKKNLIGALLFDSGETAEAT
RLKRTARRRYTRRKNRICYLQEIFSNEMAKVDDSFFHRLEESFLVEEDKKHERHPIFGNIVD
EVAYHEKYPTIYHLRKKLVDSTDKADLRLIYLALAHMIKFRGHFLIEGDLNPDNSDVDKLFI
QLVQTYNQLFEENPINASGVDAKAILSARLSKSRRLENLIAQLPGEKKNGLFGNLIALSLGL
TPNFKSNFDLAEDAKLQLSKDTYDDDLDNLLAQIGDQYADLFLAAKNLSDAILLSDILRVNT
EITKAPLSASMIKRYDEHHQDLTLLKALVRQQLPEKYKEIFFDQSKNGYAGYIDGGASQEEF
YKFIKPILEKMDGTEELLVKLNREDLLRKQRTFDNGSIPHQIHLGELHAILRRQEDFYPFLK
DNREKIEKILTFRIPYYVGPLARGNSRFAWMTRKSEETITPWNFEEVVDKGASAQSFIERMT
NFDKNLPNEKVLPKHSLLYEYFTVYNELTKVKYVTEGMRKPAFLSGEQKKAIVDLLFKTNRK
VTVKQLKEDYFKKIECFDSVEISGVEDRFNASLGTYHDLLKIIKDKDFLDNEENEDILEDIV
LTLTLFEDREMIEERLKTYAHLFDDKVMKQLKRRRYTGWGRLSRKLINGIRDKQSGKTILDF
LKSDGFANRNFMQLIHDDSLTFKEDIQKAQVSGQGDSLHEHIANLAGSPAIKKGILQTVKVV
DELVKVMGRHKPENIVIEMARENQTTQKGQKNSRERMKRIEEGIKELGSQILKEHPVENTQL
QNEKLYLYYLQNGRDMYVDQELDINRLSDYDVDHIVPQSFLKDDSIDNKVLTRSDKNRGKSD
NVPSEEVVKKMKNYWRQLLNAKLITQRKFDNLTKAERGGLSELDKAGFIKRQLVETRQITKH
VAQILDSRMNTKYDENDKLIREVKVITLKSKLVSDFRKDFQFYKVREINNYHHAHDAYLNAV
VGTALIKKYPKLESEFVYGDYKVYDVRKMIAKSEQEIGKATAKYFFYSNIMNFFKTEITLAN
GEIRKRPLIETNGETGEIVWDKGRDFATVRKVLSMPQVNIVKKTEVQTGGFSKESILPKRNS
DKLIARKKDWDPKKYGGFDSPTVAYSVLVVAKVEKGKSKKLKSVKELLGITIMERSSFEKNP
IDFLEAKGYKEVKKDLIIKLPKYSLFELENGRKRMLASAGELQKGNELALPSKYVNFLYLAS
HYEKLKGSPEDNEQKQLFVEQHKHYLDEIIEQISEFSKRVILADANLDKVLSAYNKHRDKPI
REQAENIIHLFTLTNLGAPAAFKYFDTTIDRKRYTSTKEVLDATLIHQSITGLYETRIDLSQ
LGGD

(single underline: HNH domain; double underline: RuvC domain)

[0114] In some embodiments, wild-type Cas9 corresponds to Cas9 from Streptococcus pyogenes (NCBI Reference Sequence: NC_002737.2 (nucleotide sequence as follows); and Uniprot Reference Sequence: Q99ZW2 (amino acid sequence as follows).

ATGGATAAGAAATACTCAATAGGCTTAGATATCGGCACAAATAGCGTCGGATGGGCGGTGAT
CACTGATGAATATAAGGTTCCGTCTAAAAAGTTCAAGGTTCTGGGAAATACAGACCGCCACA
GTATCAAAAAAAATCTTATAGGGGCTCTTTTATTTGACAGTGGAGAGACAGCGGAAGCGACT
CGTCTCAAACGGACAGCTCGTAGAAGGTATACACGTCGGAAGAATCGTATTTGTTATCTACA
GGAGATTTTTTCAAATGAGATGGCGAAAGTAGATGATAGTTTCTTTCATCGACTTGAAGAGT
CTTTTTTGGTGGAAGAAGACAAGAAGCATGAACGTCATCCTATTTTTGGAAATATAGTAGAT
GAAGTTGCTTATCATGAGAAATATCCAACTATCTATCATCTGCGAAAAAAATTGGTAGATTC
TACTGATAAAGCGGATTTGCGCTTAATCTATTTGGCCTTAGCGCATATGATTAAGTTTCGTG
GTCATTTTTTGATTGAGGGAGATTTAAATCCTGATAATAGTGATGTGGACAAACTATTTATC
CAGTTGGTACAAACCTACAATCAATTATTTGAAGAAAACCCTATTAACGCAAGTGGAGTAGA
TGCTAAAGCGATTCTTTCTGCACGATTGAGTAAATCAAGACGATTAGAAAATCTCATTGCTC
AGCTCCCCGGTGAGAAGAAAAATGGCTTATTTGGGAATCTCATTGCTTTGTCATTGGGTTTG
ACCCCTAATTTTAAATCAAATTTTGATTTGGCAGAAGATGCTAAATTACAGCTTTCAAAAGA
TACTTACGATGATGATTTAGATAATTTATTGGCGCAAATTGGAGATCAATATGCTGATTTGT
TTTTGGCAGCTAAGAATTTATCAGATGCTATTTTACTTTCAGATATCCTAAGAGTAAATACT
GAAATAACTAAGGCTCCCCTATCAGCTTCAATGATTAAACGCTACGATGAACATCATCAAGA
CTTGACTCTTTTAAAAGCTTTAGTTCGACAACAACTTCCAGAAAAGTATAAAGAAATCTTTT
TTGATCAATCAAAAAACGGATATGCAGGTTATATTGATGGGGGAGCTAGCCAAGAAGAATTT
TATAAATTTATCAAACCAATTTTAGAAAAAATGGATGGTACTGAGGAATTATTGGTGAAACT
AAATCGTGAAGATTTGCTGCGCAAGCAACGGACCTTTGACAACGGCTCTATTCCCCATCAAA
TTCACTTGGGTGAGCTGCATGCTATTTTGAGAAGACAAGAAGACTTTTATCCATTTTTAAAA
GACAATCGTGAGAAGATTGAAAAAATCTTGACTTTTCGAATTCCTTATTATGTTGGTCCATT
GGCGCGTGGCAATAGTCGTTTTGCATGGATGACTCGGAAGTCTGAAGAAACAATTACCCCAT
GGAATTTTGAAGAAGTTGTCGATAAAGGTGCTTCAGCTCAATCATTTATTGAACGCATGACA
AACTTTGATAAAAATCTTCCAAATGAAAAAGTACTACCAAAACATAGTTTGCTTTATGAGTA
TTTTACGGTTTATAACGAATTGACAAAGGTCAAATATGTTACTGAAGGAATGCGAAAACCAG
CATTTCTTTCAGGTGAACAGAAGAAAGCCATTGTTGATTTACTCTTCAAAACAAATCGAAAA
GTAACCGTTAAGCAATTAAAAGAAGATTATTTCAAAAAAATAGAATGTTTTGATAGTGTTGA
AATTTCAGGAGTTGAAGATAGATTTAATGCTTCATTAGGTACCTACCATGATTTGCTAAAAA
TTATTAAAGATAAAGATTTTTTGGATAATGAAGAAAATGAAGATATCTTAGAGGATATTGTT
TTAACATTGACCTTATTTGAAGATAGGGAGATGATTGAGGAAAGACTTAAAACATATGCTCA
CCTCTTTGATGATAAGGTGATGAAACAGCTTAAACGTCGCCGTTATACTGGTTGGGGACGTT
TGTCTCGAAAATTGATTAATGGTATTAGGGATAAGCAATCTGGCAAAACAATATTAGATTTT
TTGAAATCAGATGGTTTTGCCAATCGCAATTTTATGCAGCTGATCCATGATGATAGTTTGAC
ATTTAAAGAAGACATTCAAAAAGCACAAGTGTCTGGACAAGGCGATAGTTTACATGAACATA
TTGCAAATTTAGCTGGTAGCCCTGCTATTAAAAAAGGTATTTTACAGACTGTAAAAGTTGTT
GATGAATTGGTCAAAGTAATGGGGCGGCATAAGCCAGAAAATATCGTTATTGAAATGGCACG
TGAAAATCAGACAACTCAAAAGGGCCAGAAAAATTCGCGAGAGCGTATGAAACGAATCGAAG
AAGGTATCAAAGAATTAGGAAGTCAGATTCTTAAAGAGCATCCTGTTGAAAATACTCAATTG
CAAAATGAAAAGCTCTATCTCTATTATCTCCAAAATGGAAGAGACATGTATGTGGACCAAGA
ATTAGATATTAATCGTTTAAGTGATTATGATGTCGATCACATTGTTCCACAAAGTTTCCTTA
AAGACGATTCAATAGACAATAAGGTCTTAACGCGTTCTGATAAAAATCGTGGTAAATCGGAT
AACGTTCCAAGTGAAGAAGTAGTCAAAAAGATGAAAAACTATTGGAGACAACTTCTAAACGC
CAAGTTAATCACTCAACGTAAGTTTGATAATTTAACGAAAGCTGAACGTGGAGGTTTGAGTG
AACTTGATAAAGCTGGTTTTATCAAACGCCAATTGGTTGAAACTCGCCAAATCACTAAGCAT
GTGGCACAAATTTTGGATAGTCGCATGAATACTAAATACGATGAAAATGATAAACTTATTCG
AGAGGTTAAAGTGATTACCTTAAAATCTAAATTAGTTTCTGACTTCCGAAAAGATTTCCAAT
TCTATAAAGTACGTGAGATTAACAATTACCATCATGCCCATGATGCGTATCTAAATGCCGTC
GTTGGAACTGCTTTGATTAAGAAATATCCAAAACTTGAATCGGAGTTTGTCTATGGTGATTA
TAAAGTTTATGATGTTCGTAAAATGATTGCTAAGTCTGAGCAAGAAATAGGCAAAGCAACCG
CAAAATATTTCTTTTACTCTAATATCATGAACTTCTTCAAAACAGAAATTACACTTGCAAAT
GGAGAGATTCGCAAACGCCCTCTAATCGAAACTAATGGGGAAACTGGAGAAATTGTCTGGGA
TAAAGGGCGAGATTTTGCCACAGTGCGCAAAGTATTGTCCATGCCCCAAGTCAATATTGTCA
AGAAAACAGAAGTACAGACAGGCGGATTCTCCAAGGAGTCAATTTTACCAAAAAGAAATTCG
GACAAGCTTATTGCTCGTAAAAAAGACTGGGATCCAAAAAAATATGGTGGTTTTGATAGTCC
AACGGTAGCTTATTCAGTCCTAGTGGTTGCTAAGGTGGAAAAAGGGAAATCGAAGAAGTTAA
AATCCGTTAAAGAGTTACTAGGGATCACAATTATGGAAAGAAGTTCCTTTGAAAAAAATCCG
ATTGACTTTTTAGAAGCTAAAGGATATAAGGAAGTTAAAAAAGACTTAATCATTAAACTACC
TAAATATAGTCTTTTTGAGTTAGAAAACGGTCGTAAACGGATGCTGGCTAGTGCCGGAGAAT
TACAAAAAGGAAATGAGCTGGCTCTGCCAAGCAAATATGTGAATTTTTTATATTTAGCTAGT
CATTATGAAAAGTTGAAGGGTAGTCCAGAAGATAACGAACAAAAACAATTGTTTGTGGAGCA
GCATAAGCATTATTTAGATGAGATTATTGAGCAAATCAGTGAATTTTCTAAGCGTGTTATTT
TAGCAGATGCCAATTTAGATAAAGTTCTTAGTGCATATAACAAACATAGAGACAAACCAATA
CGTGAACAAGCAGAAAATATTATTCATTTATTTACGTTGACGAATCTTGGAGCTCCCGCTGC
TTTTAAATATTTTGATACAACAATTGATCGTAAACGATATACGTCTACAAAAGAAGTTTTAG
ATGCCACTCTTATCCATCAATCCATCACTGGTCTTTATGAAACACGCATTGATTTGAGTCAG
CTAGGAGGTGACTGA
(SEQ ID NO: 1)
MDKKYSIGLDIGTNSVGWAVITDEYKVPSKKFKVLGNTDRHSIKKNLIGALLFDSGETAEAT
RLKRTARRRYTRRKNRICYLQEIFSNEMAKVDDSFFHRLEESFLVEEDKKHERHPIFGNIVD
EVAYHEKYPTIYHLRKKLVDSTDKADLRLIYLALAHMIKFRGHFLIEGDLNPDNSDVDKLFI
QLVQTYNQLFEENPINASGVDAKAILSARLSKSRRLENLIAQLPGEKKNGLFGNLIALSLGL
TPNFKSNFDLAEDAKLQLSKDTYDDDLDNLLAQIGDQYADLFLAAKNLSDAILLSDILRVNT
EITKAPLSASMIKRYDEHHQDLTLLKALVRQQLPEKYKEIFFDQSKNGYAGYIDGGASQEEF
YKFIKPILEKMDGTEELLVKLNREDLLRKQRTFDNGSIPHQIHLGELHAILRRQEDFYPFLK
DNREKIEKILTFRIPYYVGPLARGNSRFAWMTRKSEETITPWNFEEVVDKGASAQSFIERMT
NFDKNLPNEKVLPKHSLLYEYFTVYNELTKVKYVTEGMRKPAFLSGEQKKAIVDLLFKTNRK
VTVKQLKEDYFKKIECFDSVEISGVEDRFNASLGTYHDLLKIIKDKDFLDNEENEDILEDIV
LTLTLFEDREMIEERLKTYAHLFDDKVMKQLKRRRYTGWGRLSRKLINGIRDKQSGKTILDF
LKSDGFANRNFMQLIHDDSLTFKEDIQKAQVSGQGDSLHEHIANLAGSPAIKKGILQTVKVV
DELVKVMGRHKPENIVIEMARENQTTQKGQKNSRERMKRIEEGIKELGSQILKEHPVENTQL
QNEKLYLYYLQNGRDMYVDQELDINRLSDYDVDHIVPQSFLKDDSIDNKVLTRSDKNRGKSD
NVPSEEVVKKMKNYWRQLLNAKLITQRKFDNLTKAERGGLSELDKAGFIKRQLVETRQITKH
VAQILDSRMNTKYDENDKLIREVKVITLKSKLVSDFRKDFQFYKVREINNYHHAHDAYLNAV
VGTALIKKYPKLESEFVYGDYKVYDVRKMIAKSEQEIGKATAKYFFYSNIMNFFKTEITLAN
GEIRKRPLIETNGETGEIVWDKGRDFATVRKVLSMPQVNIVKKTEVQTGGFSKESILPKRNS
DKLIARKKDWDPKKYGGFDSPTVAYSVLVVAKVEKGKSKKLKSVKELLGITIMERSSFEKNP
IDFLEAKGYKEVKKDLIIKLPKYSLFELENGRKRMLASAGELQKGNELALPSKYVNFLYLAS
HYEKLKGSPEDNEQKQLFVEQHKHYLDEIIEQISEFSKRVILADANLDKVLSAYNKHRDKPI
REQAENIIHLFTLTNLGAPAAFKYFDTTIDRKRYTSTKEVLDATLIHQSITGLYETRIDLSQ
LGGD

(single underline: HNH domain; double underline: RuvC domain)

[0115] In some embodiments, Cas9 refers to Cas9 from: Corynebacterium ulcerans (NCBI Refs: NC_015683.1, NC_017317.1); Corynebacterium diphtheria (NCBI Refs: NC_016782.1, NC_016786.1); Spiroplasma syrphidicola (NCBI Ref: NC_021284.1); Prevotella intermedia (NCBI Ref: NC_017861.1); Spiroplasma taiwanense (NCBI Ref: NC_021846.1); Streptococcus iniae (NCBI Ref: NC_021314.1); Belliella baltica (NCBI Ref: NC_018010.1); Psychroflexus torquis I (NCBI Ref: NC_018721.1); Streptococcus thermophilus (NCBI Ref: YP_820832.1), Listeria innocua (NCBI Ref: NP 472073.1), Campylobacter jejuni (NCBI Ref: YP_002344900.1) or Neisseria meningitidis (NCBI Ref: YP_002342100.1) or to a Cas9 from any other organism.

[0116] In some embodiments, dCas9 corresponds to, or comprises in part or in whole, a Cas9 amino acid sequence having one or more mutations that inactivate the Cas9 nuclease activity. For example, in some embodiments, a dCas9 domain comprises D10A and an H840A mutation or corresponding mutations in another Cas9. In some embodiments, the dCas9 comprises the amino acid sequence of dCas9 (D10A and H840A):

MDKKYSIGLAIGTNSVGWAVITDEYKVPSKKFKVLGNTDRHSIKKNLIGALLFDSGETAEAT
RLKRTARRRYTRRKNRICYLQEIFSNEMAKVDDSFFHRLEESFLVEEDKKHERHPIFGNIVD
EVAYHEKYPTIYHLRKKLVDSTDKADLRLIYLALAHMIKFRGHFLIEGDLNPDNSDVDKLFI
QLVQTYNQLFEENPINASGVDAKAILSARLSKSRRLENLIAQLPGEKKNGLFGNLIALSLGL
TPNFKSNFDLAEDAKLQLSKDTYDDDLDNLLAQIGDQYADLFLAAKNLSDAILLSDILRVNT
EITKAPLSASMIKRYDEHHQDLTLLKALVRQQLPEKYKEIFFDQSKNGYAGYIDGGASQEEF
YKFIKPILEKMDGTEELLVKLNREDLLRKQRTFDNGSIPHQIHLGELHAILRRQEDFYPFLK
DNREKIEKILTFRIPYYVGPLARGNSRFAWMTRKSEETITPWNFEEVVDKGASAQSFIERMT
NFDKNLPNEKVLPKHSLLYEYFTVYNELTKVKYVTEGMRKPAFLSGEQKKAIVDLLFKTNRK
VTVKQLKEDYFKKIECFDSVEISGVEDRFNASLGTYHDLLKIIKDKDFLDNEENEDILEDIV
LTLTLFEDREMIEERLKTYAHLFDDKVMKQLKRRRYTGWGRLSRKLINGIRDKQSGKTILDF
LKSDGFANRNFMQLIHDDSLTFKEDIQKAQVSGQGDSLHEHIANLAGSPAIKKGILQTVKVV
DELVKVMGRHKPENIVIEMARENQTTQKGQKNSRERMKRIEEGIKELGSQILKEHPVENTQL
QNEKLYLYYLQNGRDMYVDQELDINRLSDYDVDAIVPQSFLKDDSIDNKVLTRSDKNRGKSD
NVPSEEVVKKMKNYWRQLLNAKLITQRKFDNLTKAERGGLSELDKAGFIKRQLVETRQITKH
VAQILDSRMNTKYDENDKLIREVKVITLKSKLVSDFRKDFQFYKVREINNYHHAHDAYLNAV
VGTALIKKYPKLESEFVYGDYKVYDVRKMIAKSEQEIGKATAKYFFYSNIMNFFKTEITLAN
GEIRKRPLIETNGETGEIVWDKGRDFATVRKVLSMPQVNIVKKTEVQTGGFSKESILPKRNS
DKLIARKKDWDPKKYGGFDSPTVAYSVLVVAKVEKGKSKKLKSVKELLGITIMERSSFEKNP
IDFLEAKGYKEVKKDLIIKLPKYSLFELENGRKRMLASAGELQKGNELALPSKYVNFLYLAS
HYEKLKGSPEDNEQKQLFVEQHKHYLDEIIEQISEFSKRVILADANLDKVLSAYNKHRDKPI
REQAENIIHLFTLTNLGAPAAFKYFDTTIDRKRYTSTKEVLDATLIHQSITGLYETRIDLSQ
LGGD

(single underline: HNH domain; double underline: RuvC domain).

[0117] In some embodiments, the Cas9 domain comprises a D10A mutation, while the residue at position 840 remains a histidine in the amino acid sequence provided above, or at corresponding positions in any of the amino acid sequences provided herein.

[0118] In other embodiments, dCas9 variants having mutations other than D10A and H840A are provided, which, e.g., result in nuclease inactivated Cas9 (dCas9). Such mutations, by way of example, include other amino acid substitutions at D10 and H840, or other substitutions within the nuclease domains of Cas9 (e.g., substitutions in the HNH nuclease subdomain and/or the RuvC1 subdomain). In some embodiments, variants or homologues of dCas9 are provided which are at least about 70% identical, at least about 80% identical, at least about 90% identical, at least about 95% identical, at least about 98% identical, at least about 99% identical, at least about 99.5% identical, or at least about 99.9% identical. In some embodiments, variants of dCas9 are provided having amino acid sequences which are shorter, or longer, by about 5 amino acids, by about 10 amino acids, by about 15 amino acids, by about 20 amino acids, by about 25 amino acids, by about 30 amino acids, by about 40 amino acids, by about 50 amino acids, by about 75 amino acids, by about 100 amino acids or more.

[0119] In some embodiments, Cas9 fusion proteins as provided herein comprise the full-length amino acid sequence of a Cas9 protein, e.g., one of the Cas9 sequences provided herein. In other embodiments, however, fusion proteins as provided herein do not comprise a full-length Cas9 sequence, but only one or more fragments thereof. Exemplary amino acid sequences of suitable Cas9 domains and Cas9 fragments are provided herein, and additional suitable sequences of Cas9 domains and fragments will be apparent to those of skill in the art.

[0120] It should be appreciated that additional Cas9 proteins (e.g., a nuclease dead Cas9 (dCas9), a Cas9 nickase (nCas9), or a nuclease active Cas9), including variants and homologs thereof, are within the scope of this disclosure. Exemplary Cas9 proteins include, without limitation, those provided below. In some embodiments, the Cas9 protein is a nuclease dead Cas9 (dCas9). In some embodiments, the Cas9 protein is a Cas9 nickase (nCas9). In some embodiments, the Cas9 protein is a nuclease active Cas9.

Exemplary Catalytically Inactive Cas9 (dCas9):

DKKYSIGLAIGTNSVGWAVITDEYKVPSKKFKVLGNTDRHSIKKNLIGA
LLFDSGETAEATRLKRTARRRYTRRKNRICYLQEIFSNEMAKVDDSFFH
RLEESFLVEEDKKHERHPIFGNIVDEVAYHEKYPTIYHLRKKLVDSTDK
ADLRLIYLALAHMIKFRGHFLIEGDLNPDNSDVDKLFIQLVQTYNQLFE
ENPINASGVDAKAILSARLSKSRRLENLIAQLPGEKKNGLFGNLIALSL
GLTPNFKSNFDLAEDAKLQLSKDTYDDDLDNLLAQIGDQYADLFLAAKN
LSDAILLSDILRVNTEITKAPLSASMIKRYDEHHQDLTLLKALVRQQLP
EKYKEIFFDQSKNGYAGYIDGGASQEEFYKFIKPILEKMDGTEELLVKL
NREDLLRKQRTFDNGSIPHQIHLGELHAILRRQEDFYPFLKDNREKIEK
ILTFRIPYYVGPLARGNSRFAWMTRKSEETITPWNFEEVVDKGASAQSF
IERMTNFDKNLPNEKVLPKHSLLYEYFTVYNELTKVKYVTEGMRKPAFL
SGEQKKAIVDLLFKTNRKVTVKQLKEDYFKKIECFDSVEISGVEDRFNA
SLGTYHDLLKIIKDKDFLDNEENEDILEDIVLTLTLFEDREMIEERLKT
YAHLFDDKVMKQLKRRRYTGWGRLSRKLINGIRDKQSGKTILDFLKSDG
FANRNFMQLIHDDSLTFKEDIQKAQVSGQGDSLHEHIANLAGSPAIKKG
ILQTVKVVDELVKVMGRHKPENIVIEMARENQTTQKGQKNSRERMKRIE
EGIKELGSQILKEHPVENTQLQNEKLYLYYLQNGRDMYVDQELDINRLS
DYDVDAIVPQSFLKDDSIDNKVLTRSDKNRGKSDNVPSEEVVKKMKNYW
RQLLNAKLITQRKFDNLTKAERGGLSELDKAGFIKRQLVETRQITKHVA
QILDSRMNTKYDENDKLIREVKVITLKSKLVSDFRKDFQFYKVREINNY
HHAHDAYLNAVVGTALIKKYPKLESEFVYGDYKVYDVRKMIAKSEQEIG
KATAKYFFYSNIMNFFKTEITLANGEIRKRPLIETNGETGEIVWDKGRD
FATVRKVLSMPQVNIVKKTEVQTGGFSKESILPKRNSDKLIARKKDWDP
KKYGGFDSPTVAYSVLVVAKVEKGKSKKLKSVKELLGITIMERSSFEKN
PIDFLEAKGYKEVKKDLIIKLPKYSLFELENGRKRMLASAGELQKGNEL
ALPSKYVNFLYLASHYEKLKGSPEDNEQKQLFVEQHKHYLDEIIEQISE
FSKRVILADANLDKVLSAYNKHRDKPIREQAENIIHLFTLTNLGAPAAF
KYFDTTIDRKRYTSTKEVLDATLIHQSITGLYETRIDLSQLGGD

Exemplary Catalytically Cas9 Nickase (nCas9):

DKKYSIGLAIGTNSVGWAVITDEYKVPSKKFKVLGNTDRHSIKKNLIGA
LLFDSGETAEATRLKRTARRRYTRRKNRICYLQEIFSNEMAKVDDSFFH
RLEESFLVEEDKKHERHPIFGNIVDEVAYHEKYPTIYHLRKKLVDSTDK
ADLRLIYLALAHMIKFRGHFLIEGDLNPDNSDVDKLFIQLVQTYNQLFE
ENPINASGVDAKAILSARLSKSRRLENLIAQLPGEKKNGLFGNLIALSL
GLTPNFKSNFDLAEDAKLQLSKDTYDDDLDNLLAQIGDQYADLFLAAKN
LSDAILLSDILRVNTEITKAPLSASMIKRYDEHHQDLTLLKALVRQQLP
EKYKEIFFDQSKNGYAGYIDGGASQEEFYKFIKPILEKMDGTEELLVKL
NREDLLRKQRTFDNGSIPHQIHLGELHAILRRQEDFYPFLKDNREKIEK
ILTFRIPYYVGPLARGNSRFAWMTRKSEETITPWNFEEVVDKGASAQSF
IERMTNFDKNLPNEKVLPKHSLLYEYFTVYNELTKVKYVTEGMRKPAFL
SGEQKKAIVDLLFKTNRKVTVKQLKEDYFKKIECFDSVEISGVEDRFNA
SLGTYHDLLKIIKDKDFLDNEENEDILEDIVLTLTLFEDREMIEERLKT
YAHLFDDKVMKQLKRRRYTGWGRLSRKLINGIRDKQSGKTILDFLKSDG
FANRNFMQLIHDDSLTFKEDIQKAQVSGQGDSLHEHIANLAGSPAIKKG
ILQTVKVVDELVKVMGRHKPENIVIEMARENQTTQKGQKNSRERMKRIE
EGIKELGSQILKEHPVENTQLQNEKLYLYYLQNGRDMYVDQELDINRLS
DYDVDHIVPQSFLKDDSIDNKVLTRSDKNRGKSDNVPSEEVVKKMKNYW
RQLLNAKLITQRKFDNLTKAERGGLSELDKAGFIKRQLVETRQITKHVA
QILDSRMNTKYDENDKLIREVKVITLKSKLVSDFRKDFQFYKVREINNY
HHAHDAYLNAVVGTALIKKYPKLESEFVYGDYKVYDVRKMIAKSEQEIG
KATAKYFFYSNIMNFFKTEITLANGEIRKRPLIETNGETGEIVWDKGRD
FATVRKVLSMPQVNIVKKTEVQTGGFSKESILPKRNSDKLIARKKDWDP
KKYGGFDSPTVAYSVLVVAKVEKGKSKKLKSVKELLGITIMERSSFEKN
PIDFLEAKGYKEVKKDLIIKLPKYSLFELENGRKRMLASAGELQKGNEL
ALPSKYVNFLYLASHYEKLKGSPEDNEQKQLFVEQHKHYLDEIIEQISE
FSKRVILADANLDKVLSAYNKHRDKPIREQAENIIHLFTLTNLGAPAAF
KYFDTTIDRKRYTSTKEVLDATLIHQSITGLYETRIDLSQLGGD

### Exemplary Catalytically Active Cas9:

DKKYSIGLDIGTNSVGWAVITDEYKVPSKKFKVLGNTDRHSIKKNLIGA
LLFDSGETAEATRLKRTARRRYTRRKNRICYLQEIFSNEMAKVDDSFFH
RLEESFLVEEDKKHERHPIFGNIVDEVAYHEKYPTIYHLRKKLVDSTDK
ADLRLIYLALAHMIKFRGHFLIEGDLNPDNSDVDKLFIQLVQTYNQLFE
ENPINASGVDAKAILSARLSKSRRLENLIAQLPGEKKNGLFGNLIALSL
GLTPNFKSNFDLAEDAKLQLSKDTYDDDLDNLLAQIGDQYADLFLAAKN
LSDAILLSDILRVNTEITKAPLSASMIKRYDEHHQDLTLLKALVRQQLP
EKYKEIFFDQSKNGYAGYIDGGASQEEFYKFIKPILEKMDGTEELLVKL
NREDLLRKQRTFDNGSIPHQIHLGELHAILRRQEDFYPFLKDNREKIEK
ILTFRIPYYVGPLARGNSRFAWMTRKSEETITPWNFEEVVDKGASAQSF
IERMTNFDKNLPNEKVLPKHSLLYEYFTVYNELTKVKYVTEGMRKPAFL
SGEQKKAIVDLLFKTNRKVTVKQLKEDYFKKIECFDSVEISGVEDRFNA
SLGTYHDLLKIIKDKDFLDNEENEDILEDIVLTLTLFEDREMIEERLKT
YAHLFDDKVMKQLKRRRYTGWGRLSRKLINGIRDKQSGKTILDFLKSDG
FANRNFMQLIHDDSLTFKEDIQKAQVSGQGDSLHEHIANLAGSPAIKKG
ILQTVKVVDELVKVMGRHKPENIVIEMARENQTTQKGQKNSRERMKRIE
EGIKELGSQILKEHPVENTQLQNEKLYLYYLQNGRDMYVDQELDINRLS
DYDVDHIVPQSFLKDDSIDNKVLTRSDKNRGKSDNVPSEEVVKKMKNYW
RQLLNAKLITQRKFDNLTKAERGGLSELDKAGFIKRQLVETRQITKHVA
QILDSRMNTKYDENDKLIREVKVITLKSKLVSDFRKDFQFYKVREINNY
HHAHDAYLNAVVGTALIKKYPKLESEFVYGDYKVYDVRKMIAKSEQEIG
KATAKYFFYSNIMNFFKTEITLANGEIRKRPLIETNGETGEIVWDKGRD
FATVRKVLSMPQVNIVKKTEVQTGGFSKESILPKRNSDKLIARKKDWDP
KKYGGFDSPTVAYSVLVVAKVEKGKSKKLKSVKELLGITIMERSSFEKN
PIDFLEAKGYKEVKKDLIIKLPKYSLFELENGRKRMLASAGELQKGNEL
ALPSKYVNFLYLASHYEKLKGSPEDNEQKQLFVEQHKHYLDEIIEQISE
FSKRVILADANLDKVLSAYNKHRDKPIREQAENIIHLFTLTNLGAPAAF
KYFDTTIDRKRYTSTKEVLDATLIHQSITGLYETRIDLSQLGGD.

[0122] In some embodiments, Cas9 refers to a Cas9 from archaea (e.g., nanoarchaea), which constitute a domain and kingdom of single-celled prokaryotic microbes. In some embodiments, Cas9 refers to CasX or CasY, which have been described in, for example, Burstein et al., “New CRISPR-Cas systems from uncultivated microbes.” Cell Res. 2017 Feb. 21. doi: 10.1038/cr.2017.21, the entire contents of which is hereby incorporated by reference. Using genome-resolved metagenomics, a number of CRISPR-Cas systems were identified, including the first reported Cas9 in the archaeal domain of life. This divergent Cas9 protein was found in little-studied nanoarchaea as part of an active CRISPR-Cas system. In bacteria, two previously unknown systems were discovered, CRISPR-CasX and CRISPR-CasY, which are among the most compact systems yet discovered. In some embodiments, Cas9 refers to CasX, or a variant of CasX. In some embodiments, Cas9 refers to a CasY, or a variant of CasY. It should be appreciated that other RNA-guided DNA binding proteins may be used as a nucleic acid programmable DNA binding protein (napDNAbp), and are within the scope of this disclosure.

[0123] In particular embodiments, napDNAbps useful in the methods of the invention include circular permutants, which are known in the art and described, for example, by Oakes et al., Cell 176, 254-267, 2019. An exemplary circular permutant follows where the bold sequence indicates sequence derived from Cas9, the italics sequence denotes a linker sequence, and the underlined sequence denotes a bipartite nuclear localization sequence, CP5 (with MSP “NGC=Pam Variant with mutations Regular Cas9 likes NGG” PID=Protein Interacting Domain and “D10A” nickase):

EIGKATAKYFFYSNIMNFFKTEITLANGEIRKRPLIETNGETGEIVWDKG
RDFATVRKVLSMPQVNIVKKTEVQTGGFSKESILPKRNSDKLIARKKDWD
PKKYGGFMQPTVAYSVLVVAKVEKGKSKKLKSVKELLGITIMERSSFEKN
PIDFLEAKGYKEVKKDLIIKLPKYSLFELENGRKRMLASAKFLQKGNELA
LPSKYVNFLYLASHYEKLKGSPEDNEQKQLFVEQHKHYLDEIIEQISEFS
KRVILADANLDKVLSAYNKHRDKPIREQAENIIHLFTLTNLGAPRAFKYF
DTTIARKEYRSTKEVLDATLIHQSITGLYETRIDLSQLGGDGGSGGSGGS
GGSGGSGGSGGMDKKYSIGLAIGTNSVGWAVITDEYKVPSKKFKVLGNTD
RHSIKKNLIGALLFDSGETAEATRLKRTARRRYTRRKNRICYLQEIFSNE
MAKVDDSFFHRLEESFLVEEDKKHERHPIFGNIVDEVAYHEKYPTIYHLR
KKLVDSTDKADLRLIYLALAHMIKFRGHFLIEGDLNPDNSDVDKLFIQLV
QTYNQLFEENPINASGVDAKAILSARLSKSRRLENLIAQLPGEKKNGLFG
NLIALSLGLTPNFKSNFDLAEDAKLQLSKDTYDDDLDNLLAQIGDQYADL
FLAAKNLSDAILLSDILRVNTEITKAPLSASMIKRYDEHHQDLTLLKALV
RQQLPEKYKEIFFDQSKNGYAGYIDGGASQEEFYKFIKPILEKMDGTEEL
LVKLNREDLLRKQRTFDNGSIPHQIHLGELHAILRRQEDFYPFLKDNREK
IEKILTFRIPYYVGPLARGNSRFAWMTRKSEETITPWNFEEVVDKGASAQ
SFIERMTNFDKNLPNEKVLPKHSLLYEYFTVYNELTKVKYVTEGMRKPAF
LSGEQKKAIVDLLFKTNRKVTVKQLKEDYFKKIECFDSVEISGVEDRFNA
SLGTYHDLLKIIKDKDFLDNEENEDILEDIVLTLTLFEDREMIEERLKTY
AHLFDDKVMKQLKRRRYTGWGRLSRKLINGIRDKQSGKTILDFLKSDGFA
NRNFMQLIHDDSLTFKEDIQKAQVSGQGDSLHEHIANLAGSPAIKKGILQ
TVKVVDELVKVMGRHKPENIVIEMARENQTTQKGQKNSRERMKRIEEGIK
ELGSQILKEHPVENTQLQNEKLYLYYLQNGRDMYVDQELDINRLSDYDVD
HIVPQSFLKDDSIDNKVLTRSDKNRGKSDNVPSEEVVKKMKNYWRQLLNA
KLITQRKFDNLTKAERGGLSELDKAGFIKRQLVETRQITKHVAQILDSRM
NTKYDENDKLIREVKVITLKSKLVSDFRKDFQFYKVREINNYHHAHDAYL
NAVVGTALIKKYPKLESEFVYGDYKVYDVRKMIAKSEQEGADKRTADGSE
FESPKKKRKV*

[0124] Non-limiting examples of a polynucleotide programmable nucleotide binding domain which can be incorporated into a base editor include a CRISPR protein-derived domain, a restriction nuclease, a meganuclease, TAL nuclease (TALEN), and a zinc finger nuclease (ZFN).

[0125] In some embodiments, the nucleic acid programmable DNA binding protein (napDNAbp) of any of the fusion proteins provided herein may be a CasX or CasY protein. In some embodiments, the napDNAbp is a CasX protein. In some embodiments, the napDNAbp is a CasY protein. In some embodiments, the napDNAbp comprises an amino acid sequence that is at least 85%, at least 90, at least 91%, at least 92%, at least 93%, at least 94%, at least 95%, at least 96%, at least 97%, at least 98%, at least 99%, or at ease 99.5% identical to a naturally-occurring CasX or CasY protein. In some embodiments, the napDNAbp is a naturally-occurring CasX or CasY protein. In some embodiments, the napDNAbp comprises an amino acid sequence that is at least 85%, at least 90%, at least 91%, at least 92%, at least 93%, at least 94%, at least 95%, at least 96%, at least 97%, at least 98%, at least 99%, or at ease 99.5% identical to any CasX or CasY protein described herein. It should be appreciated that Cas12b/C2c1, CasX and CasY from other bacterial species may also be used in accordance with the present disclosure.

Cas12b/C2c1 (uniprot.org/uniprot/T0D7A2#2)
sp|T0D7A2|C2C1_ALIAG CRISPR-associated endo-nuclease C2c1 OS =
Alicyclobacillus acido-terrestris (strain ATCC 49025/DSM 3922/CIP 106132/
NCIMB 13137/GD3B) GN = c2c1 PE = 1 SV = 1
MAVKSIKVKLRLDDMPEIRAGLWKLHKEVNAGVRYYTEWLSLLRQENLYRRSPNGDGEQECD
KTAEECKAELLERLRARQVENGHRGPAGSDDELLQLARQLYELLVPQAIGAKGDAQQIARKF
LSPLADKDAVGGLGIAKAGNKPRWVRMREAGEPGWEEEKEKAETRKSADRTADVLRALADFG
LKPLMRVYTDSEMSSVEWKPLRKGQAVRTWDRDMFQQAIERMMSWESWNQRVGQEYAKLVEQ
KNRFEQKNFVGQEHLVHLVNQLQQDMKEASPGLESKEQTAHYVTGRALRGSDKVFEKWGKLA
PDAPFDLYDAEIKNVQRRNTRRFGSHDLFAKLAEPEYQALWREDASFLTRYAVYNSILRKLN
HAKMFATFTLPDATAHPIWTRFDKLGGNLHQYTFLFNEFGERRHAIRFHKLLKVENGVAREV
DDVTVPISMSEQLDNLLPRDPNEPIALYFRDYGAEQHFTGEFGGAKIQCRRDQLAHMHRRRG
ARDVYLNVSVRVQSQSEARGERRPPYAAVFRLVGDNHRAFVHFDKLSDYLAEHPDDGKLGSE
GLLSGLRVMSVDLGLRTSASISVFRVARKDELKPNSKGRVPFFFPIKGNDNLVAVHERSQLL
KLPGETESKDLRAIREERQRTLRQLRTQLAYLRLLVRCGSEDVGRRERSWAKLIEQPVDAAN
HMTPDWREAFENELQKLKSLHGICSDKEWMDAVYESVRRVWRHMGKQVRDWRKDVRSGERPK
IRGYAKDVVGGNSIEQIEYLERQYKFLKSWSFFGKVSGQVIRAEKGSRFAITLREHIDHAKE
DRLKKLADRIIMEALGYVYALDERGKGKWVAKYPPCQLILLEELSEYQFNNDRPPSENNQLM
QWSHRGVFQELINQAQVHDLLVGTMYAAFSSRFDARTGAPGIRCRRVPARCTQEHNPEPFPW
WLNKFVVEHTLDACPLRADDLIPTGEGEIFVSPFSAEEGDFHQIHADLNAAQNLQQRLWSDF
DISQIRLRCDWGEVDGELVLIPRLTGKRTADSYSNKVFYTNTGVTYYERERGKKRRKVFAQE
KLSEEEAELLVEADEAREKSVVLMRDPSGIINRGNWTRQKEFWSMVNQRIEGYLVKQIRSR
VPLQDSACENTGDI
CasX (uniprot.org/uniprot/F0NN87; uniprot.org/uniprot/F0NH53)
>tr|F0NN87|F0NN87_SULIH CRISPR-associated Casx protein OS = Sulfolobus
islandicus (strain HVE10/4) GN = SiH_0402 PE = 4 SV = 1
MEVPLYNIFGDNYIIQVATEAENSTIYNNKVEIDDEELRNVLNLAYKIAKNNEDAAAERRGK
AKKKKGEEGETTTSNIILPLSGNDKNPWTETLKCYNFPTTVALSEVFKNFSQVKECEEVSAP
SFVKPEFYEFGRSPGMVERTRRVKLEVEPHYLIIAAAGWVLTRLGKAKVSEGDYVGVNVFTP
TRGILYSLIQNVNGIVPGIKPETAFGLWIARKVVSSVTNPNVSVVRIYTISDAVGQNPTTIN
GGFSIDLTKLLEKRYLLSERLEAIARNALSISSNMRERYIVLANYIYEYLTG SKRLEDLLY
FANRDLIMNLNSDDGKVRDLKLISAYVNGELIRGEG
>tr|F0NH53|F0NH53_SULIR CRISPR associated protein, Casx OS = Sulfolobus
islandicus (strain REY15A) GN = SiRe_0771 PE = 4 SV = 1
MEVPLYNIFGDNYIIQVATEAENSTIYNNKVEIDDEELRNVLNLAYKIAKNNEDAAAERRGK
AKKKKGEEGETTTSNIILPLSGNDKNPWTETLKCYNFPTTVALSEVFKNFSQVKECEEVSAP
SFVKPEFYKFGRSPGMVERTRRVKLEVEPHYLIMAAAGWVLTRLGKAKVSEGDYVGVNVFTP
TRGILYSLIQNVNGIVPGIKPETAFGLWIARKVVSSVTNPNVSVVSIYTISDAVGQNPTTIN
GGFSIDLTKLLEKRDLLSERLEAIARNALSISSNMRERYIVLANYIYEYLTGSKRLEDLLYF
ANRDLIMNLNSDDGKVRDLKLISAYVNGELIRGEG
Deltaproteobacteria CasX
MEKRINKIRKKLSADNATKPVSRSGPMKTLLVRVMTDDLKKRLEKRRKKPEVMPQVISNNAA
NNLRMLLDDYTKMKEAILQVYWQEFKDDHVGLMCKFAQPASKKIDQNKLKPEMDEKGNLTTA
GFACSQCGQPLFVYKLEQVSEKGKAYTNYFGRCNVAEHEKLILLAQLKPVKDSDEAVTYSLG
KFGQRALDFYSIHVTKESTHPVKPLAQIAGNRYASGPVGKALSDACMGTIASFLSKYQDIII
EHQKVVKGNQKRLESLRELAGKENLEYPSVTLPPQPHTKEGVDAYNEVIARVRMWVNLNLWQ
KLKLSRDDAKPLLRLKGFPSFPVVERRENEVDWWNTINEVKKLIDAKRDMGRVFWSGVTAEK
RNTILEGYNYLPNENDHKKREGSLENPKKPAKRQFGDLLLYLEKKYAGDWGKVFDEAWERID
KKIAGLTSHIEREEARNAEDAQSKAVLTDWLRAKASFVLERLKEMDEKEFYACEIQLQKWYG
DLRGNPFAVEAENRVVDISGFSIGSDGHSIQYRNLLAWKYLENGKREFYLLMNYGKKGRIRF
TDGTDIKKSGKWQGLLYGGGKAKVIDLTFDPDDEQLIILPLAFGTRQGREFIWNDLLSLETG
LIKLANGRVIEKTIYNKKIGRDEPALFVALTFERREVVDPSNIKPVNLIGVARGENIPAVIA
LTDPEGCPLPEFKDSSGGPTDILRIGEGYKEKQRAIQAAKEVEQRRAGGYSRKFASKSRNLA
DDMVRNSARDLFYHAVTHDAVLVFANLSRGFGRQGKRTFMTERQYTKMEDWLTAKLAYEGLT
SKTYLSKTLAQYTSKTCSNCGFTITYADMDVMLVRLKKTSDGWATTLNNKELKAEYQITYYN
RYKRQTVEKELSAELDRLSEESGNNDISKWTKGRRDEALFLLKKRFSHRPVQEQFVCLDCGH
EVHAAEQAALNIARSWLFLNSNSTEFKSYKSGKQPFVGAWQAFYKRRLKEVWKPNA
CasY (ncbi.nlm.nih.gov/protein/APG80656. 1)
>APG80656.1 CRISPR-associated protein CasY [uncultured Parcubacteria
group bacterium]
MSKRHPRISGVKGYRLHAQRLEYTGKSGAMRTIKYPLYSSPSGGRTVPREIVSAINDDYVGL
YGLSNFDDLYNAEKRNEEKVYSVLDFWYDCVQYGAVFSYTAPGLLKNVAEVRGGSYELTKTL
KGSHLYDELQIDKVIKFLNKKEISRANGSLDKLKKDIIDCFKAEYRERHKDQCNKLADDIKN
AKKDAGASLGERQKKLFRDFFGISEQSENDKPSFTNPLNLTCCLLPFDTVNNNRNRGEVLFN
KLKEYAQKLDKNEGSLEMWEYIGIGNSGTAFSNFLGEGFLGRLRENKITELKKAMMDITDAW
RGQEQEEELEKRLRILAALTIKLREPKFDNHWGGYRSDINGKLSSWLQNYINQTVKIKEDLK
GHKKDLKKAKEMINRFGESDTKEEAVVSSLLESIEKIVPDDSADDEKPDIPAIAIYRRFLSD
GRLTLNRFVQREDVQEALIKERLEAEKKKKPKKRKKKSDAEDEKETIDFKELFPHLAKPLKL
VPNFYGDSKRELYKKYKNAAIYTDALWKAVEKIYKSAFSSSLKNSFFDTDFDKDFFIKRLQK
IFSVYRRFNTDKWKPIVKNSFAPYCDIVSLAENEVLYKPKQSRSRKSAAIDKNRVRLPSTEN
IAKAGIALARELSVAGFDWKDLLKKEEHEEYIDLIELHKTALALLLAVTETQLDISALDFVE
NGTVKDFMKTRDGNLVLEGRFLEMFSQSIVFSELRGLAGLMSRKEFITRSAIQTMNGKQAEL
LYIPHEFQSAKITTPKEMSRAFLDLAPAEFATSLEPESLSEKSLLKLKQMRYYPHYFGYELT
RTGQGIDGGVAENALRLEKSPVKKREIKCKQYKTLGRGQNKIVLYVRSSYYQTQFLEWFLHR
PKNVQTDVAVSGSFLIDEKKVKTRWNYDALTVALEPVSGSERVFVSQPFTIFPEKSAEEEGQ
RYLGIDIGEYGIAYTALEITGDSAKILDQNFISDPQLKTLREEVKGLKLDQRRGTFAMPSTK
IARIRESLVHSLRNRIHHLALKHKAKIVYELEVSRFEEGKQKIKKVYATLKKADVYSEIDAD
KNLQTTVWGKLAVASEISASYTSQFCGACKKLWRAEMQVDETITTQELIGTVRVIKGGTLID
AIKDFMRPPIFDENDTPFPKYRDFCDKHHISKKMRGNSCLFICPFCRANADADIQASQTIAL
LRYVKEEKKVEDYFERFRKLKNIKVLGQMKKI

[0126] The term “Cas12” or “Cas12 domain” refers to an RNA guided nuclease comprising a Cas12 protein or a fragment thereof (e.g., a protein comprising an active, inactive, or partially active DNA cleavage domain of Cas12, and/or the gRNA binding domain of Cas12). Cas12 belongs to the class 2, Type V CRISPR/Cas system. A Cas12 nuclease is also referred to sometimes as a CRISPR (clustered regularly interspaced short palindromic repeat) associated nuclease. The sequence of an exemplary Bacillus hisashii Cas 12b (BhCas12b) Cas 12 domain is provided below:

MAPKKKRKVGIHGVPAAATRSFILKIEPNEEVKKGLWKTHEVLNHGIAY
YMNILKLIRQEAIYEHHEQDPKNPKKVSKAEIQAELWDFVLKMQKCNSF
THEVDKDEVFNILRELYEELVPSSVEKKGEANQLSNKFLYPLVDPNSQS
GKGTASSGRKPRWYNLKIAGDPSWEEEKKKWEEDKKKDPLAKILGKLAE
YGLIPLFIPYTDSNEPIVKEIKWMEKSRNQSVRRLDKDMFIQALERFLS
WESWNLKVKEEYEKVEKEYKTLEERIKEDIQALKALEQYEKERQEQLLR
DTLNTNEYRLSKRGLRGWREIIQKWLKMDENEPSEKYLEVFKDYQRKHP
REAGDYSVYEFLSKKENHFIWRNHPEYPYLYATFCEIDKKKKDAKQQAT
FTLADPINHPLWVRFEERSGSNLNKYRILTEQLHTEKLKKKLTVQLDRL
IYPTESGGWEEKGKVDIVLLPSRQFYNQIFLDIEEKGKHAFTYKDESIK
FPLKGTLGGARVQFDRDHLRRYPHKVESGNVGRIYFNMTVNIEPTESPV
SKSLKIHRDDFPKVVNFKPKELTEWIKDSKGKKLKSGIESLEIGLRVMS
IDLGQRQAAAASIFEVVDQKPDIEGKLFFPIKGTELYAVHRASFNIKLP
GETLVKSREVLRKAREDNLKLMNQKLNFLRNVLHFQQFEDITEREKRVT
KWISRQENSDVPLVYQDELIQIRELMYKPYKDWVAFLKQLHKRLEVEIG
KEVKHWRKSLSDGRKGLYGISLKNIDEIDRTRKFLLRWSLRPTEPGEVR
RLEPGQRFAIDQLNHLNALKEDRLKKMANTIIMHALGYCYDVRKKKWQA
KNPACQIILFEDLSNYNPYEERSRFENSKLMKWSRREIPRQVALQGEIY
GLQVGEVGAQFSSRFHAKTGSPGIRCSVVTKEKLQDNRFFKNLQREGRL
TLDKIAVLKEGDLYPDKGGEKFISLSKDRKCVTTHADINAAQNLQKRFW
TRTHGFYKVYCKAYQVDGQTVYIPESKDQKQKIIEEFGEGYFILKDGVY
EWVNAGKLKIKKGSSKQSSSELVDSDILKDSFDLASELKGEKLMLYRDP
SGNVFPSDKWMAAGVFFGKLERILISKLTNQYSISTIEDDSSKQSMKRP
AATKKAGQAKKKK.

[0127] Amino acid sequences having at least 85% or greater identity to the BhCas12b amino acid sequence are also useful in the methods of the invention.

[0128] By “cytidine deaminase” is meant a polypeptide or fragment thereof capable of catalyzing a deamination reaction that converts an amino group to a carbonyl group. In one embodiment, the cytidine deaminase converts cytosine to uracil or 5-methylcytosine to thymine. PmCDA1, which is derived from Petromyzon marinus (Petromyzon marinus cytosine deaminase 1, “PmCDA1”), AID (Activation-induced cytidine deaminase; AICDA), which is derived from a mammal (e.g., human, swine, bovine, horse, monkey etc.), and APOBEC are exemplary cytidine deaminases.

[0129] The term “conservative amino acid substitution” or “conservative mutation” refers to the replacement of one amino acid by another amino acid with a common property. A functional way to define common properties between individual amino acids is to analyze the normalized frequencies of amino acid changes between corresponding proteins of homologous organisms (Schulz, G. E. and Schirmer, R. H., Principles of Protein Structure, Springer-Verlag, New York (1979)). According to such analyses, groups of amino acids can be defined where amino acids within a group exchange preferentially with each other, and therefore resemble each other most in their impact on the overall protein structure (Schulz, G. E. and Schirmer, R. H., supra). Non-limiting examples of conservative mutations include amino acid substitutions of amino acids, for example, lysine for arginine and vice versa such that a positive charge can be maintained; glutamic acid for aspartic acid and vice versa such that a negative charge can be maintained; serine for threonine such that a free —OH can be maintained; and glutamine for asparagine such that a free —NH₂ can be maintained.

[0130] The term “coding sequence” or “protein coding sequence” as used interchangeably herein refers to a segment of a polynucleotide that codes for a protein. The region or sequence is bounded nearer the 5′ end by a start codon and nearer the 3′ end with a stop codon. Coding sequences can also be referred to as open reading frames.

[0131] The term “deaminase” or “deaminase domain,” as used herein, refers to a protein or enzyme that catalyzes a deamination reaction. In some embodiments, the deaminase is an adenosine deaminase, which catalyzes the hydrolytic deamination of adenine to hypoxanthine. In some embodiments, the deaminase is an adenosine deaminase, which catalyzes the hydrolytic deamination of adenosine or adenine (A) to inosine (I). In some embodiments, the deaminase or deaminase domain is an adenosine deaminase catalyzing the hydrolytic deamination of adenosine or deoxyadenosine to inosine or deoxyinosine, respectively. In some embodiments, the adenosine deaminase catalyzes the hydrolytic deamination of adenosine in deoxyribonucleic acid (DNA). The adenosine deaminases (e.g., engineered adenosine deaminases, evolved adenosine deaminases) provided herein can be from any organism, such as a bacterium. In some embodiments, the adenosine deaminase is from a bacterium, such as Escherichia coli, Staphylococcus aureus, Salmonella typhimurium, Shewanella putrefaciens, Haemophilus influenzae, or Caulobacter crescentus.

[0132] In some embodiments, the adenosine deaminase is a TadA deaminase. In some embodiments, the TadA deaminase is TadA variant. In some embodiments, the TadA variant is a TadA*8. In some embodiments, the deaminase or deaminase domain is a variant of a naturally occurring deaminase from an organism, such as a human, chimpanzee, gorilla, monkey, cow, dog, rat, or mouse. In some embodiments, the deaminase or deaminase domain does not occur in nature. For example, in some embodiments, the deaminase or deaminase domain is at least 50%, at least 55%, at least 60%, at least 65%, at least 70%, at least 75% at least 80%, at least 85%, at least 90%, at least 91%, at least 92%, at least 93%, at least 94%, at least 95%, at least 96%, at least 97%, at least 98%, at least 99%, at least 99.1%, at least 99.2%, at least 99.3%, at least 99.4%, at least 99.5%, at least 99.6%, at least 99.7%, at least 99.8%, or at least 99.9% identical to a naturally occurring deaminase. For example, deaminase domains are described in International PCT Application Nos. PCT/2017/045381 (WO 2018/027078) and PCT/US2016/058344 (WO 2017/070632), each of which is incorporated herein by reference for its entirety. Also, see Komor, A. C., et al., “Programmable editing of a target base in genomic DNA without double-stranded DNA cleavage” Nature 533, 420-424 (2016); Gaudelli, N. M., et al., “Programmable base editing of A⋅T to G⋅C in genomic DNA without DNA cleavage” Nature 551, 464-471 (2017); Komor, A. C., et al., “Improved base excision repair inhibition and bacteriophage Mu Gam protein yields C:G-to-T:A base editors with higher efficiency and product purity” Science Advances 3:eaao4774 (2017)), and Rees, H. A., et al., “Base editing: precision chemistry on the genome and transcriptome of living cells.” Nat Rev Genet. 2018 December; 19(12):770-788. doi: 10.1038/s41576-018-0059-1, the entire contents of which are hereby incorporated by reference.

[0133] “Detect” refers to identifying the presence, absence or amount of the analyte to be detected. In one embodiment, a sequence alteration in a polynucleotide or polypeptide is detected. In another embodiment, the presence of indels is detected.

[0134] By “detectable label” is meant a composition that when linked to a molecule of interest renders the latter detectable, via spectroscopic, photochemical, biochemical, immunochemical, or chemical means. For example, useful labels include radioactive isotopes, magnetic beads, metallic beads, colloidal particles, fluorescent dyes, electron-dense reagents, enzymes (for example, as commonly used in an enzyme linked immunosorbent assay (ELISA)), biotin, digoxigenin, or haptens.

[0135] By “disease” is meant any condition or disorder that damages or interferes with the normal function of a cell, tissue, or organ.

[0136] The term “effective amount,” as used herein, refers to an amount of a biologically active agent that is sufficient to elicit a desired biological response. The effective amount of an active agent(s) used to practice the present invention for therapeutic treatment of a disease varies depending upon the manner of administration, the age, body weight, and general health of the subject. Ultimately, the attending physician or veterinarian will decide the appropriate amount and dosage regimen. Such amount is referred to as an “effective” amount. In one embodiment, an effective amount is the amount of a base editor of the invention (e.g., a fusion protein comprising a programmable DNA binding protein, a nucleobase editor and gRNA) sufficient to introduce an alteration in a gene of interest in a cell (e.g., a cell in vitro or in vivo). In some embodiments, an effective amount of a fusion protein provided herein, e.g., of a nucleobase editor comprising a nCas9 domain and a deaminase domain (e.g., adenosine deaminase or cytidine deaminase) may refer to the amount of the fusion protein that is sufficient to induce editing of a target site specifically bound and edited by the nucleobase editor. In one embodiment, an effective amount is the amount of a base editor required to achieve a therapeutic effect (e.g., to reduce or control a disease or a symptom or condition thereof). Such therapeutic effect need not be sufficient to alter a gene of interest in all cells of a subject, tissue or organ, but only to alter a gene of interest in about 1%, 5%, 10%, 25%, 50%, 75% or more of the cells present in a subject, tissue or organ.

[0137] In some embodiments, an effective amount of a fusion protein provided herein, e.g., of a nucleobase editor comprising a nCas9 domain and a deaminase domain (e.g., adenosine deaminase or cytidine deaminase) refers to the amount of the fusion protein that is sufficient to induce editing of a target site specifically bound and edited by the nucleobase editors described herein. As will be appreciated by the skilled artisan, the effective amount of an agent, e.g., a fusion protein, a nuclease, a hybrid protein, a protein dimer, a complex of a protein (or protein dimer) and a polynucleotide, or a polynucleotide, may vary depending on various factors as, for example, on the desired biological response, e.g., on the specific allele, genome, or target site to be edited, on the cell or tissue being targeted, and/or on the agent being used.

[0138] By “fragment” is meant a portion of a polypeptide or nucleic acid molecule. This portion contains, at least about 10%, 20%, 30%, 40%, 50%, 60%, 70%, 80%, or 90% of the entire length of the reference nucleic acid molecule or polypeptide. A fragment may contain 10, 20, 30, 40, 50, 60, 70, 80, 90, or 100, 200, 300, 400, 500, 600, 700, 800, 900, or 1000 nucleotides or amino acids.

[0139] By “guide RNA” or “gRNA” is meant a polynucleotide which can be specific for a target sequence and can form a complex with a polynucleotide programmable nucleotide binding domain protein (e.g., Cas9 or Cpf1). In an embodiment, the guide polynucleotide is a guide RNA (gRNA). gRNAs can exist as a complex of two or more RNAs, or as a single RNA molecule. gRNAs that exist as a single RNA molecule may be referred to as single-guide RNAs (sgRNAs), though “gRNA” is used interchangeably to refer to guide RNAs that exist as either single molecules or as a complex of two or more molecules. Typically, gRNAs that exist as single RNA species comprise two domains: (1) a domain that shares homology to a target nucleic acid (e.g., and directs binding of a Cas9 complex to the target); and (2) a domain that binds a Cas9 protein. In some embodiments, domain (2) corresponds to a sequence known as a tracrRNA, and comprises a stem-loop structure. For example, in some embodiments, domain (2) is identical or homologous to a tracrRNA as provided in Jinek et al., Science 337:816-821(2012), the entire contents of which is incorporated herein by reference. Other examples of gRNAs (e.g., those including domain 2) can be found in U.S. Provisional Patent Application, U.S. Ser. No. 61/874,682, filed Sep. 6, 2013, entitled “Switchable Cas9 Nucleases and Uses Thereof,” and U.S. Provisional Patent Application, U.S. Ser. No. 61/874,746, filed Sep. 6, 2013, entitled “Delivery System For Functional Nucleases,” the entire contents of each are hereby incorporated by reference in their entirety. In some embodiments, a gRNA comprises two or more of domains (1) and (2), and may be referred to as an “extended gRNA.” An extended gRNA will bind two or more Cas9 proteins and bind a target nucleic acid at two or more distinct regions, as described herein. The gRNA comprises a nucleotide sequence that complements a target site, which mediates binding of the nuclease/RNA complex to said target site, providing the sequence specificity of the nuclease:RNA complex.

[0140] “Hybridization” means hydrogen bonding, which may be Watson-Crick, Hoogsteen or reversed Hoogsteen hydrogen bonding, between complementary nucleobases. For example, adenine and thymine are complementary nucleobases that pair through the formation of hydrogen bonds.

[0141] The term “inhibitor of base repair” or “IBR” refers to a protein that is capable in inhibiting the activity of a nucleic acid repair enzyme, for example a base excision repair (BER) enzyme. In some embodiments, the IBR is an inhibitor of inosine base excision repair. Exemplary inhibitors of base repair include inhibitors of APE1, Endo III, Endo IV, Endo V, Endo VIII, Fpg, hOGGl, hNEILl, T7 Endol, T4PDG, UDG, hSMUGl, and hAAG. In some embodiments, the IBR is an inhibitor of Endo V or hAAG. In some embodiments, the IBR is a catalytically inactive EndoV or a catalytically inactive hAAG. In some embodiments, the base repair inhibitor is an inhibitor of Endo V or hAAG. In some embodiments, the base repair inhibitor is a catalytically inactive EndoV or a catalytically inactive hAAG.

[0142] In some embodiments, the base repair inhibitor is uracil glycosylase inhibitor (UGI). UGI refers to a protein that is capable of inhibiting a uracil-DNA glycosylase base-excision repair enzyme. In some embodiments, a UGI domain comprises a wild-type UGI or a fragment of a wild-type UGI. In some embodiments, the UGI proteins provided herein include fragments of UGI and proteins homologous to a UGI or a UGI fragment. In some embodiments, the base repair inhibitor is an inhibitor of inosine base excision repair. In some embodiments, the base repair inhibitor is a “catalytically inactive inosine specific nuclease” or “dead inosine specific nuclease. Without wishing to be bound by any particular theory, catalytically inactive inosine glycosylases (e.g., alkyl adenine glycosylase (AAG)) can bind inosine, but cannot create an abasic site or remove the inosine, thereby sterically blocking the newly formed inosine moiety from DNA damage/repair mechanisms. In some embodiments, the catalytically inactive inosine specific nuclease can be capable of binding an inosine in a nucleic acid but does not cleave the nucleic acid. Non-limiting exemplary catalytically inactive inosine specific nucleases include catalytically inactive alkyl adenosine glycosylase (AAG nuclease), for example, from a human, and catalytically inactive endonuclease V (EndoV nuclease), for example, from E. coli. In some embodiments, the catalytically inactive AAG nuclease comprises an E125Q mutation or a corresponding mutation in another AAG nuclease.

[0143] By “increases” is meant a positive alteration of at least 10%, 25%, 50%, 75%, or 100%.

[0144] An “intein” is a fragment of a protein that is able to excise itself and join the remaining fragments (the exteins) with a peptide bond in a process known as protein splicing. Inteins are also referred to as “protein introns.” The process of an intein excising itself and joining the remaining portions of the protein is herein termed “protein splicing” or “intein-mediated protein splicing.” In some embodiments, an intein of a precursor protein (an intein containing protein prior to intein-mediated protein splicing) comes from two genes. Such intein is referred to herein as a split intein (e.g., split intein-N and split intein-C). For example, in cyanobacteria, DnaE, the catalytic subunit a of DNA polymerase III, is encoded by two separate genes, dnaE-n and dnaE-c. The intein encoded by the dnaE-n gene may be herein referred as “intein-N.” The intein encoded by the dnaE-c gene may be herein referred as “intein-C.”

[0145] Other intein systems may also be used. For example, a synthetic intein based on the dnaE intein, the Cfa-N (e.g., split intein-N) and Cfa-C (e.g., split intein-C) intein pair, has been described (e.g., in Stevens et al., J Am Chem Soc. 2016 Feb. 24; 138(7):2162-5, incorporated herein by reference). Non-limiting examples of intein pairs that may be used in accordance with the present disclosure include: Cfa DnaE intein, Ssp GyrB intein, Ssp DnaX intein, Ter DnaE3 intein, Ter ThyX intein, Rma DnaB intein and Cne Prp8 intein (e.g., as described in U.S. Pat. No. 8,394,604, incorporated herein by reference.

[0146] Exemplary nucleotide and amino acid sequences of inteins are provided.

DnaE Intein-N DNA:
TGCCTGTCATACGAAACCGAGATACTGACAGTAGAATATGGCCTTCTGC
CATCGGGAAGATTGTGGAGAAACGGATAGAATGCACAGTTTACTCTGTC
GATAACAATGGTAACATTTATACTCAGCCAGTTGCCCAGTGGCACGACC
GGGGAGAGCAGGAAGTATTCGAATACTGTCTGGAGGATGGAAGTCTCAT
TAGGGCCACTAAGGACCACAAATTTATGACAGTCGATGGCCAGATGCTG
CCTATAGACGAAATCTTTGAGCGAGAGTTGGACCTCATGCGAGTTGACA
ACCTTCCTAT
DnaE Intein-N Protein:
CLSYETEILTVEYGLLPIGKIVEKRIECTVYSVDNNGNIYTQPVAQWHD
RGEQEVFEYCLEDGSLIRATKDHKFMTVDGQMLPIDEIFERELDLMRVD
NLPN
DnaE Intein-C DNA:
ATGATCAAGATAGCTACAAGGAAGTATCTTGGCAAACAAAACGTTTATG
ATATTGGAGTCGAAAGAGATCACAACTTTGCTCTGAAGAACGGATTCAT
AGCTTCTAT
Intein-C:
MIKIATRKYLGKQNVYDIGVERDHNFALKNGFIASN
Cfa-N DNA:
TGCCTGICTTATGATACCGAGATACTTACCGTTGAATATGGCTTCTTGC
CTATTGGAAAGATTGTCGAAGAGAGAATTGAATGCACAGTATATACTGT
AGACAAGAATGGTTTCGTTTACACACAGCCCATTGCTCATGGCACAATC
GCGGCGAACAAGAAGTATTTGAGTACTGTCTCGAGGATGGAAGCATCAT
ACGAGCAACTAAAGATCATAAATTCATGACCACTGACGGGCAGATGTTG
CCAATAGATGAGATATTCGAGCGGGGCTTGGATCTCAAACAAGTGGATG
GATTGCCA
Cfa-N Protein:
CLSYDTEILTVEYGFLPIGKIVEERIECTVYTVDKNGFVYTQPIAQWHN
RGEQEVFEYCLEDGSIIRATKDHKFMTTDGQMLPIDEIFERGLDLKQVD
GLP
Cfa-C DNA:
ATGAAGAGGACTGCCGATGGATCAGAGTTTGAATCTCCCAAGAAGAAGA
GGAAAGTAAAGATAATATCTCGAAAAAGTCTTGGTACCCAAAATGTCTA
TGATATTGGAGTGGAGAAAGATCACAACTTCCTTCTCAAGAACGGTCTC
GTAGCCAGCAAC
Cfa-C Protein:
MKRTADGSEFESPKKKRKVKIISRKSLGTQNVYDIGVEKDHNFLLKNGL
VASN

[0147] Intein-N and intein-C may be fused to the N-terminal portion of the split Cas9 and the C-terminal portion of the split Cas9, respectively, for the joining of the N-terminal portion of the split Cas9 and the C-terminal portion of the split Cas9. For example, in some embodiments, an intein-N is fused to the C-terminus of the N-terminal portion of the split Cas9, i.e., to form a structure of N—[N-terminal portion of the split Cas9]-[intein-N]—C. In some embodiments, an intein-C is fused to the N-terminus of the C-terminal portion of the split Cas9, i.e., to form a structure of N-[intein-C]—[C-terminal portion of the split Cas9]-C. The mechanism of intein-mediated protein splicing for joining the proteins the inteins are fused to (e.g., split Cas9) is known in the art, e.g., as described in Shah et al., Chem Sci. 2014; 5(1):446-461, incorporated herein by reference. Methods for designing and using inteins are known in the art and described, for example by WO2014004336, WO2017132580, US20150344549, and US20180127780, each of which is incorporated herein by reference in their entirety.

[0148] The terms “isolated,” “purified,” or “biologically pure” refer to material that is free to varying degrees from components which normally accompany it as found in its native state. “Isolate” denotes a degree of separation from original source or surroundings. “Purify” denotes a degree of separation that is higher than isolation. A “purified” or “biologically pure” protein is sufficiently free of other materials such that any impurities do not materially affect the biological properties of the protein or cause other adverse consequences. That is, a nucleic acid or peptide of this invention is purified if it is substantially free of cellular material, viral material, or culture medium when produced by recombinant DNA techniques, or chemical precursors or other chemicals when chemically synthesized. Purity and homogeneity are typically determined using analytical chemistry techniques, for example, polyacrylamide gel electrophoresis or high-performance liquid chromatography. The term “purified” can denote that a nucleic acid or protein gives rise to essentially one band in an electrophoretic gel. For a protein that can be subjected to modifications, for example, phosphorylation or glycosylation, different modifications may give rise to different isolated proteins, which can be separately purified.

[0149] By “isolated polynucleotide” is meant a nucleic acid (e.g., a DNA) that is free of the genes which, in the naturally-occurring genome of the organism from which the nucleic acid molecule of the invention is derived, flank the gene. The term therefore includes, for example, a recombinant DNA that is incorporated into a vector; into an autonomously replicating plasmid or virus; or into the genomic DNA of a prokaryote or eukaryote; or that exists as a separate molecule (for example, a cDNA or a genomic or cDNA fragment produced by PCR or restriction endonuclease digestion) independent of other sequences. In addition, the term includes an RNA molecule that is transcribed from a DNA molecule, as well as a recombinant DNA that is part of a hybrid gene encoding additional polypeptide sequence.

[0150] By an “isolated polypeptide” is meant a polypeptide of the invention that has been separated from components that naturally accompany it. Typically, the polypeptide is isolated when it is at least 60%, by weight, free from the proteins and naturally-occurring organic molecules with which it is naturally associated. Preferably, the preparation is at least 75%, more preferably at least 90%, and most preferably at least 99%, by weight, a polypeptide of the invention. An isolated polypeptide of the invention may be obtained, for example, by extraction from a natural source, by expression of a recombinant nucleic acid encoding such a polypeptide; or by chemically synthesizing the protein. Purity can be measured by any appropriate method, for example, column chromatography, polyacrylamide gel electrophoresis, or by HPLC analysis.

[0151] The term “linker”, as used herein, can refer to a covalent linker (e.g., covalent bond), a non-covalent linker, a chemical group, or a molecule linking two molecules or moieties, e.g., two components of a protein complex or a ribonucleocomplex, or two domains of a fusion protein, such as, for example, a polynucleotide programmable DNA binding domain (e.g., dCas9) and a deaminase domain (e.g., an adenosine deaminase, a cytidine deaminase, or an adenosine deaminase and a cytidine deaminase) or a napDNAbp domain (e.g., Cas12b) and a deaminase domain (e.g., an adenosine deaminase or a cytidine deaminase). In particular embodiments, linkers flank a deaminase domain that is inserted within a Cas protein or fragment thereof. A linker can join different components of, or different portions of components of, a base editor system. For example, in some embodiments, a linker can join a guide polynucleotide binding domain of a polynucleotide programmable nucleotide binding domain and a catalytic domain of a deaminase. In some embodiments, a linker can join a CRISPR polypeptide and a deaminase. In some embodiments, a linker can join a Cas9 and a deaminase. In some embodiments, a linker can join a dCas9 and a deaminase. In some embodiments, a linker can join a nCas9 and a deaminase. For example, in some embodiments, a linker can join a Cas12a/Cpf1, Cas12b/C2cl, Cas12c/C2c3, Cas12d/CasY, Cas12e/CasX, Cas12g, Cas12h, or Cas12i and a deaminase. In some embodiments, a linker can join a guide polynucleotide and a deaminase. In some embodiments, a linker can join a deaminating component and a polynucleotide programmable nucleotide binding component of a base editor system. In some embodiments, a linker can join an RNA-binding portion of a deaminating component and a napDNAbp component of a base editor system. In some embodiments, a linker can join an RNA-binding portion of a deaminating component and a polynucleotide programmable nucleotide binding component of a base editor system. In some embodiments, a linker can join an RNA-binding portion of a deaminating component and an RNA-binding portion of a polynucleotide programmable nucleotide binding component of a base editor system. A linker can be positioned between, or flanked by, two groups, molecules, or other moieties and connected to each one via a covalent bond or non-covalent interaction, thus connecting the two. In some embodiments, the linker can be an organic molecule, group, polymer, or chemical moiety. In some embodiments, the linker can be a polynucleotide. In some embodiments, the linker can be a DNA linker. In some embodiments, the linker can be an RNA linker. In some embodiments, a linker can comprise an aptamer capable of binding to a ligand. In some embodiments, the ligand may be carbohydrate, a peptide, a protein, or a nucleic acid. In some embodiments, the linker may comprise an aptamer may be derived from a riboswitch. The riboswitch from which the aptamer is derived may be selected from a theophylline riboswitch, a thiamine pyrophosphate (TPP) riboswitch, an adenosine cobalamin (AdoCbl) riboswitch, an S-adenosyl methionine (SAM) riboswitch, an SAH riboswitch, a flavin mononucleotide (FMN) riboswitch, a tetrahydrofolate riboswitch, a lysine riboswitch, a glycine riboswitch, a purine riboswitch, a GlmS riboswitch, or a pre-queosine1 (PreQ1) riboswitch. In some embodiments, a linker may comprise an aptamer bound to a polypeptide or a protein domain, such as a polypeptide ligand. In some embodiments, the polypeptide ligand may be a K Homology (KH) domain, a MS2 coat protein domain, a PP7 coat protein domain, a SfMu Com coat protein domain, a sterile alpha motif, a telomerase Ku binding motif and Ku protein, a telomerase Sm7 binding motif and Sm7 protein, or an RNA recognition motif. In some embodiments, the polypeptide ligand may be a portion of a base editor system component. For example, a nucleobase editing component may comprise a deaminase domain and an RNA recognition motif.

[0152] In some embodiments, the linker can be an amino acid or a plurality of amino acids (e.g., a peptide or protein). In some embodiments, the linker can be about 5-100 amino acids in length, for example, about 5, 6, 7, 8, 9, 10, 11, 12, 13, 14, 15, 16, 17, 18, 19, 20, 20-30, 30-40, 40-50, 50-60, 60-70, 70-80, 80-90, or 90-100 amino acids in length. In some embodiments, the linker can be about 100-150, 150-200, 200-250, 250-300, 300-350, 350-400, 400-450, or 450-500 amino acids in length. Longer or shorter linkers can be also contemplated.

[0153] In some embodiments, a linker joins a gRNA binding domain of an RNA-programmable nuclease, including a Cas9 nuclease domain, and the catalytic domain of a nucleic-acid editing protein (e.g., cytidine or adenosine deaminase). In some embodiments, a linker joins a dCas9 and a nucleic-acid editing protein. For example, the linker is positioned between, or flanked by, two groups, molecules, or other moieties and connected to each one via a covalent bond, thus connecting the two. In some embodiments, the linker is an amino acid or a plurality of amino acids (e.g., a peptide or protein). In some embodiments, the linker is an organic molecule, group, polymer, or chemical moiety. In some embodiments, the linker is 5-200 amino acids in length, for example, 5, 6, 7, 8, 9, 10, 11, 12, 13, 14, 15, 16, 17, 18, 19, 20, 25, 35, 45, 50, 55, 60, 60, 65, 70, 70, 75, 80, 85, 90, 90, 95, 100, 101, 102, 103, 104, 105, 110, 120, 130, 140, 150, 160, 175, 180, 190, or 200 amino acids in length.

[0154] Longer or shorter linkers are also contemplated.

[0155] In some embodiments, the domains of the nucleobase editor are fused via a linker that comprises the amino acid sequence of SGGSSGSETPGTSESATPESSGGS, SGGSSGGSSGSETPGTSESATPESSGGSSGGS, or GGSGGSPGSPAGSPTSTEEGTSESATPESGPGTSTEPSEGSAPGSPAGSPTSTEEGTSTE PSEGSAPGTSTEPSEGSAPGTSESATPESGPGSEPATSGGSGGS. In some embodiments, domains of the nucleobase editor are fused via a linker comprising the amino acid sequence SGSETPGTSESATPES, which may also be referred to as the XTEN linker. In some embodiments, a linker comprises the amino acid sequence SGGS. In some embodiments, a linker comprises (SGGS)ₙ, (GGGS)ₙ, (GGGGS)ₙ, (G)ₙ, (EAAAK)ₙ, (GGS)ₙ, SGSETPGTSESATPES, or (XP)ₙ motif, or a combination of any of these, wherein n is independently an integer between 1 and 30, and wherein X is any amino acid. In some embodiments, n is 1, 2, 3, 4, 5, 6, 7, 8, 9, 10, 11, 12, 13, 14, or 15.

[0156] In some embodiments, the linker is 24 amino acids in length. In some embodiments, the linker comprises the amino acid sequence SGGSSGGSSGSETPGTSESATPES. In some embodiments, the linker is 40 amino acids in length. In some embodiments, the linker comprises the amino acid sequence SGGSSGGSSGSETPGTSESATPESSGGSSGGSSGGSSGGS. In some embodiments, the linker is 64 amino acids in length. In some embodiments, the linker comprises the amino acid sequence SGGSSGGSSGSETPGTSESATPESSGGSSGGSSGGSSGGSSGSETPGTSESATPESSGGS SGGS. In some embodiments, the linker is 92 amino acids in length. In some embodiments, the linker comprises the amino acid sequence PGSPAGSPTSTEEGTSESATPESGPGTSTEPSEGSAPGSPAGSPTSTEEGTSTEPSEGSAPG TSTEPSEGSAPGTSESATPESGPGSEPATS.

[0157] By “marker” is meant any protein or polynucleotide having an alteration in expression level or activity that is associated with a disease or disorder.

[0158] The term “mutation,” as used herein, refers to a substitution of a residue within a sequence, e.g., a nucleic acid or amino acid sequence, with another residue, or a deletion or insertion of one or more residues within a sequence. Mutations are typically described herein by identifying the original residue followed by the position of the residue within the sequence and by the identity of the newly substituted residue. Various methods for making the amino acid substitutions (mutations) provided herein are well known in the art, and are provided by, for example, Green and Sambrook, Molecular Cloning: A Laboratory Manual (4th ed., Cold Spring Harbor Laboratory Press, Cold Spring Harbor, N.Y. (2012)). In some embodiments, the presently disclosed base editors can efficiently generate an “intended mutation,” such as a point mutation, in a nucleic acid (e.g., a nucleic acid within a genome of a subject) without generating a significant number of unintended mutations, such as unintended point mutations. In some embodiments, an intended mutation is a mutation that is generated by a specific base editor (e.g., cytidine base editor or adenosine base editor) bound to a guide polynucleotide (e.g., gRNA), specifically designed to generate the intended mutation.

[0159] In general, mutations made or identified in a sequence (e.g., an amino acid sequence as described herein) are numbered in relation to a reference (or wild-type) sequence, i.e., a sequence that does not contain the mutations. The skilled practitioner in the art would readily understand how to determine the position of mutations in amino acid and nucleic acid sequences relative to a reference sequence.

[0160] The term “non-conservative mutations” involve amino acid substitutions between different groups, for example, lysine for tryptophan, or phenylalanine for serine, etc. In this case, it is preferable for the non-conservative amino acid substitution to not interfere with, or inhibit the biological activity of, the functional variant. The non-conservative amino acid substitution can enhance the biological activity of the functional variant, such that the biological activity of the functional variant is increased as compared to the wild-type protein.

[0161] The term “nuclear localization sequence,” “nuclear localization signal,” or “NLS” refers to an amino acid sequence that promotes import of a protein into the cell nucleus. Nuclear localization sequences are known in the art and described, for example, in Plank et al., International PCT application, PCT/EP2000/011690, filed Nov. 23, 2000, published as WO/2001/038547 on May 31, 2001, the contents of which are incorporated herein by reference for their disclosure of exemplary nuclear localization sequences. In other embodiments, the NLS is an optimized NLS described, for example, by Koblan et al., Nature Biotech. 2018 doi:10.1038/nbt.4172. In some embodiments, an NLS comprises the amino acid sequence KRTADGSEFESPKKKRKV, KRPAATKKAGQAKKKK, KKTELQTTNAENKTKKL, KRGINDRNFWRGENGRKTR, RKSGKIAAIVVKRPRK, PKKKRKV, or MDSLLMNRRKFLYQFKNVRWAKGRRETYLC.

[0162] The terms “nucleic acid” and “nucleic acid molecule,” as used herein, refer to a compound comprising a nucleobase and an acidic moiety, e.g., a nucleoside, a nucleotide, or a polymer of nucleotides. Typically, polymeric nucleic acids, e.g., nucleic acid molecules comprising three or more nucleotides are linear molecules, in which adjacent nucleotides are linked to each other via a phosphodiester linkage. In some embodiments, “nucleic acid” refers to individual nucleic acid residues (e.g., nucleotides and/or nucleosides). In some embodiments, “nucleic acid” refers to an oligonucleotide chain comprising three or more individual nucleotide residues. As used herein, the terms “oligonucleotide” and “polynucleotide” can be used interchangeably to refer to a polymer of nucleotides (e.g., a string of at least three nucleotides). In some embodiments, “nucleic acid” encompasses RNA as well as single and/or double-stranded DNA. Nucleic acids may be naturally occurring, for example, in the context of a genome, a transcript, an mRNA, tRNA, rRNA, siRNA, snRNA, a plasmid, cosmid, chromosome, chromatid, or other naturally occurring nucleic acid molecule. On the other hand, a nucleic acid molecule may be a non-naturally occurring molecule, e.g., a recombinant DNA or RNA, an artificial chromosome, an engineered genome, or fragment thereof, or a synthetic DNA, RNA, DNA/RNA hybrid, or including non-naturally occurring nucleotides or nucleosides. Furthermore, the terms “nucleic acid,” “DNA,” “RNA,” and/or similar terms include nucleic acid analogs, e.g., analogs having other than a phosphodiester backbone. Nucleic acids can be purified from natural sources, produced using recombinant expression systems and optionally purified, chemically synthesized, etc. Where appropriate, e.g., in the case of chemically synthesized molecules, nucleic acids can comprise nucleoside analogs such as analogs having chemically modified bases or sugars, and backbone modifications. A nucleic acid sequence is presented in the 5′ to 3′ direction unless otherwise indicated. In some embodiments, a nucleic acid is or comprises natural nucleosides (e.g., adenosine, thymidine, guanosine, cytidine, uridine, deoxyadenosine, deoxythymidine, deoxyguanosine, and deoxycytidine); nucleoside analogs (e.g., 2-aminoadenosine, 2-thiothymidine, inosine, pyrrolo-pyrimidine, 3-methyl adenosine, 5-methylcytidine, 2-aminoadenosine, C5-bromouridine, C5-fluorouridine, C5-iodouridine, C5-propynyl-uridine, C5-propynyl-cytidine, C5-methylcytidine, 2-aminoadenosine, 7-deazaadenosine, 7-deazaguanosine, 8-oxoadenosine, 8-oxoguanosine, 0(6)-methylguanine, and 2-thiocytidine); chemically modified bases; biologically modified bases (e.g., methylated bases); intercalated bases; modified sugars (2′—e.g., fluororibose, ribose, 2′-deoxyribose, arabinose, and hexose); and/or modified phosphate groups (e.g., phosphorothioates and 5′-N-phosphoramidite linkages).

[0163] The term “nucleic acid programmable DNA binding protein” or “napDNAbp” may be used interchangeably with “polynucleotide programmable nucleotide binding domain” to refer to a protein that associates with a nucleic acid (e.g., DNA or RNA), such as a guide nucleic acid or guide polynucleotide (e.g., gRNA), that guides the napDNAbp to a specific nucleic acid sequence. In some embodiments, the polynucleotide programmable nucleotide binding domain is a polynucleotide programmable DNA binding domain. In some embodiments, the polynucleotide programmable nucleotide binding domain is a polynucleotide programmable RNA binding domain. In some embodiments, the polynucleotide programmable nucleotide binding domain is a Cas9 protein. A Cas9 protein can associate with a guide RNA that guides the Cas9 protein to a specific DNA sequence that is complementary to the guide RNA. In some embodiments, the napDNAbp is a Cas9 domain, for example a nuclease active Cas9, a Cas9 nickase (nCas9), or a nuclease inactive Cas9 (dCas9). Non-limiting examples of nucleic acid programmable DNA binding proteins include, Cas9 (e.g., dCas9 and nCas9), Cas12a/Cpf1, Cas12b/C2cl, Cas12c/C2c3, Cas12d/CasY, Cas12e/CasX, Cas12g, Cas12h, and Cas12i. Non-limiting examples of Cas enzymes include Cas1, Cas1B, Cas2, Cas3, Cas4, Cas5, Cas5d, Cas5t, Cas5h, Cas5a, Cas6, Cas7, Cas8, Cas8a, Cas8b, Cas8c, Cas9 (also known as Csn1 or Csx12), Cas10, Cas10d, Cas12a/Cpf1, Cas12b/C2cl, Cas12c/C2c3, Cas12d/CasY, Cas12e/CasX, Cas12g, Cas12h, Cas12i, Csy1, Csy2, Csy3, Csy4, Cse1, Cse2, Cse3, Cse4, Cse5e, Csc1, Csc2, Csa5, Csn1, Csn2, Csm1, Csm2, Csm3, Csm4, Csm5, Csm6, Cmr1, Cmr3, Cmr4, Cmr5, Cmr6, Csb1, Csb2, Csb3, Csx17, Csx14, Csx10, Csx16, CsaX, Csx3, Csx1, Csx1S, Csx11, Csf1, Csf2, CsO, Csf4, Csd1, Csd2, Cst1, Cst2, Csh1, Csh2, Csa1, Csa2, Csa3, Csa4, Csa5, Type II Cas effector proteins, Type V Cas effector proteins, Type VI Cas effector proteins, CARF, DinG, homologues thereof, or modified or engineered versions thereof. Other nucleic acid programmable DNA binding proteins are also within the scope of this disclosure, although they may not be specifically listed in this disclosure. See, e.g., Makarova et al. “Classification and Nomenclature of CRISPR-Cas Systems: Where from Here?” CRISPR J. 2018 October; 1:325-336. doi: 10.1089/crispr.2018.0033; Yan et al., “Functionally diverse type V CRISPR-Cas systems” Science. 2019 Jan. 4; 363(6422):88-91. doi: 10.1126/science.aav7271, the entire contents of each are hereby incorporated by reference.

[0164] The term “nucleobase,” “nitrogenous base,” or “base,” used interchangeably herein, refers to a nitrogen-containing biological compound that forms a nucleoside, which in turn is a component of a nucleotide. The ability of nucleobases to form base pairs and to stack one upon another leads directly to long-chain helical structures such as ribonucleic acid (RNA) and deoxyribonucleic acid (DNA). Five nucleobases—adenine (A), cytosine (C), guanine (G), thymine (T), and uracil (U)—are called primary or canonical. Adenine and guanine are derived from purine, and cytosine, uracil, and thymine are derived from pyrimidine. DNA and RNA can also contain other (non-primary) bases that are modified. Non-limiting exemplary modified nucleobases can include hypoxanthine, xanthine, 7-methylguanine, 5,6-dihydrouracil, 5-methylcytosine (m5C), and 5-hydromethylcytosine. Hypoxanthine and xanthine can be created through mutagen presence, both of them through deamination (replacement of the amine group with a carbonyl group). Hypoxanthine can be modified from adenine. Xanthine can be modified from guanine. Uracil can result from deamination of cytosine. A “nucleoside” consists of a nucleobase and a five carbon sugar (either ribose or deoxyribose). Examples of a nucleoside include adenosine, guanosine, uridine, cytidine, 5-methyluridine (m5U), deoxyadenosine, deoxyguanosine, thymidine, deoxyuridine, and deoxycytidine. Examples of a nucleoside with a modified nucleobase includes inosine (I), xanthosine (X), 7-methylguanosine (m7G), dihydrouridine (D), 5-methylcytidine (m5C), and pseudouridine (Ψ). A “nucleotide” consists of a nucleobase, a five carbon sugar (either ribose or deoxyribose), and at least one phosphate group.

[0165] The term “nucleic acid programmable DNA binding protein” or “napDNAbp” refers to a protein that associates with a nucleic acid (e.g., DNA or RNA), such as a guide nucleic acid, that guides the napDNAbp to a specific nucleic acid sequence. For example, a Cas12 protein can associate with a guide RNA that guides the Cas12 protein to a specific DNA sequence that is complementary to the guide RNA. In some embodiments, the napDNAbp is a Cas12 domain, for example a nuclease active Cas12 domain. Examples of napDNAbps include, Cas12a/Cpf1, Cas12b/C2c1, Cas12c/C2c3, Cas12d/CasY, Cas12e/CasX, Cas12g, Cas12h, and Cas12i. Other napDNAbps are also within the scope of this disclosure, although they may not be specifically listed in this disclosure. See, e.g., Makarova et al. “Classification and Nomenclature of CRISPR-Cas Systems: Where from Here?” CRISPR J. 2018 October; 1:325-336. doi: 10.1089/crispr.2018.0033; Yan et al., “Functionally diverse type V CRISPR-Cas systems” Science. 2019 Jan. 4; 363(6422):88-91. doi: 10.1126/science.aav7271, the entire contents of each are hereby incorporated by reference.

[0166] The terms “nucleobase editing domain” or “nucleobase editing protein,” as used herein, refers to a protein or enzyme that can catalyze a nucleobase modification in RNA or DNA, such as cytosine (or cytidine) to uracil (or uridine) or thymine (or thymidine), and adenine (or adenosine) to hypoxanthine (or inosine) deaminations, as well as non-templated nucleotide additions and insertions. In some embodiments, the nucleobase editing domain is a deaminase domain (e.g., an adenine deaminase or an adenosine deaminase; or a cytidine deaminase or a cytosine deaminase). In some embodiments, the nucleobase editing domain is more than one deaminase domain (e.g., an adenine deaminase or an adenosine deaminase and a cytidine or a cytosine deaminase). In some embodiments, the nucleobase editing domain can be a naturally occurring nucleobase editing domain. In some embodiments, the nucleobase editing domain can be an engineered or evolved nucleobase editing domain from the naturally occurring nucleobase editing domain. The nucleobase editing domain can be from any organism, such as a bacterium, human, chimpanzee, gorilla, monkey, cow, dog, rat, or mouse. For example, nucleobase editing proteins are described in International PCT Application Nos. PCT/2017/045381 (WO 2018/027078) and PCT/US2016/058344 (WO 2017/070632), each of which is incorporated herein by reference for its entirety. Also see, Komor, A. C., et al., “Programmable editing of a target base in genomic DNA without double-stranded DNA cleavage” Nature 533, 420-424 (2016); Gaudelli, N. M., et al., “Programmable base editing of A⋅T to G⋅C in genomic DNA without DNA cleavage” Nature 551, 464-471 (2017); and Komor, A. C., et al., “Improved base excision repair inhibition and bacteriophage Mu Gam protein yields C:G-to-T:A base editors with higher efficiency and product purity” Science Advances 3:eaao4774 (2017), the entire contents of which are hereby incorporated by reference.

[0167] As used herein, “obtaining” as in “obtaining an agent” includes synthesizing, purchasing, or otherwise acquiring the agent.

[0168] A “patient” or “subject” as used herein refers to a mammalian subject or individual diagnosed with, at risk of having or developing, or suspected of having or developing a disease or a disorder. In some embodiments, the term “patient” refers to a mammalian subject with a higher than average likelihood of developing a disease or a disorder.

[0169] Exemplary patients can be humans, non-human primates, cats, dogs, pigs, cattle, cats, horses, camels, llamas, goats, sheep, rodents (e.g., mice, rabbits, rats, or guinea pigs) and other mammalians that can benefit from the therapies disclosed herein. Exemplary human patients can be male and/or female.

[0170] “Patient in need thereof” or “subject in need thereof” is referred to herein as a patient diagnosed with, at risk or having, predetermined to have, or suspected of having a disease or disorder.

[0171] The terms “pathogenic mutation,” “pathogenic variant,” “disease casing mutation,” “disease causing variant,” “deleterious mutation,” or “predisposing mutation” refers to a genetic alteration or mutation that increases an individual's susceptibility or predisposition to a certain disease or disorder. In some embodiments, the pathogenic mutation comprises at least one wild-type amino acid substituted by at least one pathogenic amino acid in a protein encoded by a gene.

[0172] The term “pharmaceutically-acceptable carrier” means a pharmaceutically-acceptable material, composition or vehicle, such as a liquid or solid filler, diluent, excipient, manufacturing aid (e.g., lubricant, talc magnesium, calcium or zinc stearate, or steric acid), or solvent encapsulating material, involved in carrying or transporting the compound from one site (e.g., the delivery site) of the body, to another site (e.g., organ, tissue or portion of the body). A pharmaceutically acceptable carrier is “acceptable” in the sense of being compatible with the other ingredients of the formulation and not injurious to the tissue of the subject (e.g., physiologically compatible, sterile, physiologic pH, etc.). The terms such as “excipient,” “carrier,” “pharmaceutically acceptable carrier,” “vehicle,” or the like are used interchangeably herein.

[0173] The term “pharmaceutical composition” can refer to a composition formulated for pharmaceutical use.

[0174] The terms “protein,” “peptide,” “polypeptide,” and their grammatical equivalents are used interchangeably herein, and refer to a polymer of amino acid residues linked together by peptide (amide) bonds. The terms refer to a protein, peptide, or polypeptide of any size, structure, or function. Typically, a protein, peptide, or polypeptide will be at least three amino acids long. A protein, peptide, or polypeptide can refer to an individual protein or a collection of proteins. One or more of the amino acids in a protein, peptide, or polypeptide can be modified, for example, by the addition of a chemical entity such as a carbohydrate group, a hydroxyl group, a phosphate group, a farnesyl group, an isofarnesyl group, a fatty acid group, a linker for conjugation, functionalization, or other modifications, etc. A protein, peptide, or polypeptide can also be a single molecule or can be a multi-molecular complex. A protein, peptide, or polypeptide can be just a fragment of a naturally occurring protein or peptide. A protein, peptide, or polypeptide can be naturally occurring, recombinant, or synthetic, or any combination thereof. The term “fusion protein” as used herein refers to a hybrid polypeptide which comprises protein domains from at least two different proteins. One protein can be located at the amino-terminal (N-terminal) portion of the fusion protein or at the carboxy-terminal (C-terminal) protein thus forming an amino-terminal fusion protein or a carboxy-terminal fusion protein, respectively. A protein can comprise different domains, for example, a nucleic acid binding domain (e.g., the gRNA binding domain of Cas9 that directs the binding of the protein to a target site) and a nucleic acid cleavage domain, or a catalytic domain of a nucleic acid editing protein. In some embodiments, a protein comprises a proteinaceous part, e.g., an amino acid sequence constituting a nucleic acid binding domain, and an organic compound, e.g., a compound that can act as a nucleic acid cleavage agent. In some embodiments, a protein is in a complex with, or is in association with, a nucleic acid, e.g., RNA or DNA. Any of the proteins provided herein can be produced by any method known in the art. For example, the proteins provided herein can be produced via recombinant protein expression and purification, which is especially suited for fusion proteins comprising a peptide linker. Methods for recombinant protein expression and purification are well known, and include those described by Green and Sambrook, Molecular Cloning: A Laboratory Manual (4th ed., Cold Spring Harbor Laboratory Press, Cold Spring Harbor, N.Y. (2012)), the entire contents of which are incorporated herein by reference.

[0175] Polypeptides and proteins disclosed herein (including functional portions and functional variants thereof) can comprise synthetic amino acids in place of one or more naturally-occurring amino acids. Such synthetic amino acids are known in the art, and include, for example, aminocyclohexane carboxylic acid, norleucine, α-amino n-decanoic acid, homoserine, S-acetylaminomethyl-cysteine, trans-3- and trans-4-hydroxyproline, 4-aminophenylalanine, 4-nitrophenylalanine, 4-chlorophenylalanine, 4-carboxyphenylalanine, β-phenylserine β-hydroxyphenylalanine, phenylglycine, α-naphthylalanine, cyclohexylalanine, cyclohexylglycine, indoline-2-carboxylic acid, 1,2,3,4-tetrahydroisoquinoline-3-carboxylic acid, aminomalonic acid, aminomalonic acid monoamide, N′-benzyl-N′-methyl-lysine, N′,N′-dibenzyl-lysine, 6-hydroxylysine, ornithine, α-aminocyclopentane carboxylic acid, α-aminocyclohexane carboxylic acid, α-aminocycloheptane carboxylic acid, α-(2-amino-2-norbornane)-carboxylic acid, α,γ-diaminobutyric acid, α,β-diaminopropionic acid, homophenylalanine, and α-tert-butylglycine. The polypeptides and proteins can be associated with post-translational modifications of one or more amino acids of the polypeptide constructs. Non-limiting examples of post-translational modifications include phosphorylation, acylation including acetylation and formylation, glycosylation (including N-linked and O-linked), amidation, hydroxylation, alkylation including methylation and ethylation, ubiquitylation, addition of pyrrolidone carboxylic acid, formation of disulfide bridges, sulfation, myristoylation, palmitoylation, isoprenylation, farnesylation, geranylation, glypiation, lipoylation and iodination.

[0176] The term “polynucleotide programmable nucleotide binding domain” or “nucleic acid programmable DNA binding protein (napDNAbp)” refers to a protein that associates with a nucleic acid (e.g., DNA or RNA), such as a guide polynucleotide (e.g., guide RNA), that guides the polynucleotide programmable nucleotide binding domain to a specific nucleic acid sequence. In some embodiments, the polynucleotide programmable nucleotide binding domain is a polynucleotide programmable DNA binding domain. In some embodiments, the polynucleotide programmable nucleotide binding domain is a polynucleotide programmable RNA binding domain. In some embodiments, the polynucleotide programmable nucleotide binding domain is a Cas12 protein.

[0177] The term “recombinant” as used herein in the context of proteins or nucleic acids refers to proteins or nucleic acids that do not occur in nature, but are the product of human engineering. For example, in some embodiments, a recombinant protein or nucleic acid molecule comprises an amino acid or nucleotide sequence that comprises at least one, at least two, at least three, at least four, at least five, at least six, or at least seven mutations as compared to any naturally occurring sequence.

[0178] By “reduces” is meant a negative alteration of at least 10%, 25%, 50%, 75%, or 100%.

[0179] By “reference” is meant a standard or control condition. In one embodiment, the reference is a wild-type or healthy cell. In other embodiments and without limitation, a reference is an untreated cell that is not subjected to a test condition, or is subjected to placebo or normal saline, medium, buffer, and/or a control vector that does not harbor a polynucleotide of interest.

[0180] A “reference sequence” is a defined sequence used as a basis for sequence comparison. A reference sequence may be a subset of or the entirety of a specified sequence; for example, a segment of a full-length cDNA or gene sequence, or the complete cDNA or gene sequence. For polypeptides, the length of the reference polypeptide sequence will generally be at least about 16 amino acids, at least about 20 amino acids, at least about 25 amino acids, about 35 amino acids, about 50 amino acids, or about 100 amino acids. For nucleic acids, the length of the reference nucleic acid sequence will generally be at least about 50 nucleotides, at least about 60 nucleotides, at least about 75 nucleotides, about 100 nucleotides or about 300 nucleotides or any integer thereabout or therebetween. In some embodiments, a reference sequence is a wild-type sequence of a protein of interest. In other embodiments, a reference sequence is a polynucleotide sequence encoding a wild-type protein.

[0181] The term “RNA-programmable nuclease,” and “RNA-guided nuclease” are used with (e.g., binds or associates with) one or more RNA(s) that is not a target for cleavage. In some embodiments, an RNA-programmable nuclease, when in a complex with an RNA, may be referred to as a nuclease:RNA complex. Typically, the bound RNA(s) is referred to as a guide RNA (gRNA). gRNAs can exist as a complex of two or more RNAs, or as a single RNA molecule. gRNAs that exist as a single RNA molecule may be referred to as single-guide RNAs (sgRNAs), though “gRNA” is used interchangeably to refer to guide RNAs that exist as either single molecules or as a complex of two or more molecules. Typically, gRNAs that exist as single RNA species comprise two domains: (1) a domain that shares homology to a target nucleic acid (e.g., and directs binding of a Cas9 complex to the target); and (2) a domain that binds a Cas9 protein. In some embodiments, domain (2) corresponds to a sequence known as a tracrRNA, and comprises a stem-loop structure. For example, in some embodiments, domain (2) is identical or homologous to a tracrRNA as provided in Jinek et ah, Science 337:816-821(2012), the entire contents of which is incorporated herein by reference. Other examples of gRNAs (e.g., those including domain 2) can be found in U.S. Provisional Patent Application, U.S. Ser. No. 61/874,682, filed Sep. 6, 2013, entitled “Switchable Cas9 Nucleases and Uses Thereof,” and U.S. Provisional Patent Application, U.S. Ser. No. 61/874,746, filed Sep. 6, 2013, entitled “Delivery System For Functional Nucleases,” the entire contents of each are hereby incorporated by reference in their entirety. In some embodiments, a gRNA comprises two or more of domains (1) and (2), and may be referred to as an “extended gRNA.” For example, an extended gRNA will, e.g., bind two or more Cas9 proteins and bind a target nucleic acid at two or more distinct regions, as described herein. The gRNA comprises a nucleotide sequence that complements a target site, which mediates binding of the nuclease/RNA complex to said target site, providing the sequence specificity of the nuclease:RNA complex.

[0182] In some embodiments, the RNA-programmable nuclease is the (CRISPR-associated system) Cas9 endonuclease, for example, Cas9 (Casnl) from Streptococcus pyogenes (see, e.g., “Complete genome sequence of an Ml strain of Streptococcus pyogenes.” Ferretti J. J., et al., Proc. Natl. Acad. Sci. U.S.A. 98:4658-4663(2001); “CRISPR RNA maturation by trans-encoded small RNA and host factor RNase III.” Deltcheva E., et al., Nature 471:602-607(2011).

[0183] Because RNA-programmable nucleases (e.g., Cas9) use RNA:DNA hybridization to target DNA cleavage sites, these proteins are able to be targeted, in principle, to any sequence specified by the guide RNA. Methods of using RNA-programmable nucleases, such as Cas9, for site-specific cleavage (e.g., to modify a genome) are known in the art (see e.g., Cong, L. et al., Multiplex genome engineering using CRISPR/Cas systems. Science 339, 819-823 (2013); Mali, P. et al., RNA-guided human genome engineering via Cas9. Science 339, 823-826 (2013); Hwang, W. Y. et al., Efficient genome editing in zebrafish using a CRISPR-Cas system. Nature biotechnology 31, 227-229 (2013); Jinek, M. et al., RNA-programmed genome editing in human cells. eLife 2, e00471 (2013); Dicarlo, J. E. et al., Genome engineering in Saccharomyces cerevisiae using CRISPR-Cas systems. Nucleic acids research (2013); Jiang, W. et al., RNA-guided editing of bacterial genomes using CRISPR-Cas systems. Nature biotechnology 31, 233-239 (2013); the entire contents of each of which are incorporated herein by reference).

[0184] The term “single nucleotide polymorphism (SNP)” is a variation in a single nucleotide that occurs at a specific position in the genome, where each variation is present to some appreciable degree within a population (e.g., >1%). For example, at a specific base position in the human genome, the C nucleotide can appear in most individuals, but in a minority of individuals, the position is occupied by an A. This means that there is a SNP at this specific position, and the two possible nucleotide variations, C or A, are said to be alleles for this position. SNPs underlie differences in susceptibility to disease. The severity of illness and the way our body responds to treatments are also manifestations of genetic variations. SNPs can fall within coding regions of genes, non-coding regions of genes, or in the intergenic regions (regions between genes). In some embodiments, SNPs within a coding sequence do not necessarily change the amino acid sequence of the protein that is produced, due to degeneracy of the genetic code. SNPs in the coding region are of two types: synonymous and nonsynonymous SNPs. Synonymous SNPs do not affect the protein sequence, while nonsynonymous SNPs change the amino acid sequence of protein. The nonsynonymous SNPs are of two types: missense and nonsense. SNPs that are not in protein-coding regions can still affect gene splicing, transcription factor binding, messenger RNA degradation, or the sequence of noncoding RNA. Gene expression affected by this type of SNP is referred to as an eSNP (expression SNP) and can be upstream or downstream from the gene. A single nucleotide variant (SNV) is a variation in a single nucleotide without any limitations of frequency and can arise in somatic cells. A somatic single nucleotide variation can also be called a single-nucleotide alteration.

[0185] By “specifically binds” is meant a nucleic acid molecule, polypeptide, or complex thereof (e.g., a nucleic acid programmable DNA binding domain and guide nucleic acid), compound, or molecule that recognizes and binds a polypeptide and/or nucleic acid molecule of the invention, but which does not substantially recognize and bind other molecules in a sample, for example, a biological sample.

[0186] Nucleic acid molecules useful in the methods of the invention include any nucleic acid molecule that encodes a polypeptide of the invention or a fragment thereof. Such nucleic acid molecules need not be 100% identical with an endogenous nucleic acid sequence, but will typically exhibit substantial identity. Polynucleotides having “substantial identity” to an endogenous sequence are typically capable of hybridizing with at least one strand of a double-stranded nucleic acid molecule. Nucleic acid molecules useful in the methods of the invention include any nucleic acid molecule that encodes a polypeptide of the invention or a fragment thereof. Such nucleic acid molecules need not be 100% identical with an endogenous nucleic acid sequence, but will typically exhibit substantial identity. Polynucleotides having “substantial identity” to an endogenous sequence are typically capable of hybridizing with at least one strand of a double-stranded nucleic acid molecule. By “hybridize” is meant pair to form a double-stranded molecule between complementary polynucleotide sequences (e.g., a gene described herein), or portions thereof, under various conditions of stringency. (See, e.g., Wahl, G. M. and S. L. Berger (1987) Methods Enzymol. 152:399; Kimmel, A. R. (1987) Methods Enzymol. 152:507).

[0187] For example, stringent salt concentration will ordinarily be less than about 750 mM NaCl and 75 mM trisodium citrate, preferably less than about 500 mM NaCl and 50 mM trisodium citrate, and more preferably less than about 250 mM NaCl and 25 mM trisodium citrate. Low stringency hybridization can be obtained in the absence of organic solvent, e.g., formamide, while high stringency hybridization can be obtained in the presence of at least about 35% formamide, and more preferably at least about 50% formamide. Stringent temperature conditions will ordinarily include temperatures of at least about 30° C., more preferably of at least about 37° C., and most preferably of at least about 42° C. Varying additional parameters, such as hybridization time, the concentration of detergent, e.g., sodium dodecyl sulfate (SDS), and the inclusion or exclusion of carrier DNA, are well known to those skilled in the art. Various levels of stringency are accomplished by combining these various conditions as needed. In a one: embodiment, hybridization will occur at 30° C. in 750 mM NaCl, 75 mM trisodium citrate, and 1% SDS. In another embodiment, hybridization will occur at 37° C. in 500 mM NaCl, 50 mM trisodium citrate, 1% SDS, 35% formamide, and 100 μg/ml denatured salmon sperm DNA (ssDNA). In another embodiment, hybridization will occur at 42° C. in 250 mM NaCl, 25 mM trisodium citrate, 1% SDS, 50% formamide, and 200 μg/ml ssDNA. Useful variations on these conditions will be readily apparent to those skilled in the art.

[0188] For most applications, washing steps that follow hybridization will also vary in stringency. Wash stringency conditions can be defined by salt concentration and by temperature. As above, wash stringency can be increased by decreasing salt concentration or by increasing temperature. For example, stringent salt concentration for the wash steps will preferably be less than about 30 mM NaCl and 3 mM trisodium citrate, and most preferably less than about 15 mM NaCl and 1.5 mM trisodium citrate. Stringent temperature conditions for the wash steps will ordinarily include a temperature of at least about 25° C., more preferably of at least about 42° C., and even more preferably of at least about 68° C. In an embodiment, wash steps will occur at 25° C. in 30 mM NaCl, 3 mM trisodium citrate, and 0.1% SDS. In a more preferred embodiment, wash steps will occur at 42 C in 15 mM NaCl, 1.5 mM trisodium citrate, and 0.1% SDS. In a more preferred embodiment, wash steps will occur at 68° C. in 15 mM NaCl, 1.5 mM trisodium citrate, and 0.1% SDS. Additional variations on these conditions will be readily apparent to those skilled in the art. Hybridization techniques are well known to those skilled in the art and are described, for example, in Benton and Davis (Science 196:180, 1977); Grunstein and Hogness (Proc. Natl. Acad. Sci., USA 72:3961, 1975); Ausubel et al. (Current Protocols in Molecular Biology, Wiley Interscience, New York, 2001); Berger and Kimmel (Guide to Molecular Cloning Techniques, 1987, Academic Press, New York); and Sambrook et al., Molecular Cloning: A Laboratory Manual, Cold Spring Harbor Laboratory Press, New York.

[0189] By “split” is meant divided into two or more fragments.

[0190] A “split Cas9 protein” or “split Cas9” refers to a Cas9 protein that is provided as an N-terminal fragment and a C-terminal fragment encoded by two separate nucleotide sequences. The polypeptides corresponding to the N-terminal portion and the C-terminal portion of the Cas9 protein may be spliced to form a “reconstituted” Cas9 protein. In particular embodiments, the Cas9 protein is divided into two fragments within a disordered region of the protein, e.g., as described in Nishimasu et al., Cell, Volume 156, Issue 5, pp. 935-949, 2014, or as described in Jiang et al. (2016) Science 351: 867-871. PDB file: 5F9R, each of which is incorporated herein by reference. In some embodiments, the protein is divided into two fragments at any C, T, A, or S within a region of SpCas9 between about amino acids A292-G364, F445-K483, or E565-T637, or at corresponding positions in any other Cas9, Cas9 variant (e.g., nCas9, dCas9), or other napDNAbp. In some embodiments, protein is divided into two fragments at SpCas9 T310, T313, A456, S469, or C574. In some embodiments, the process of dividing the protein into two fragments is referred to as “splitting” the protein.

[0191] In other embodiments, the N-terminal portion of the Cas9 protein comprises amino acids 1-573 or 1-637 S. pyogenes Cas9 wild-type (SpCas9) (NCBI Reference Sequence: NC_002737.2, Uniprot Reference Sequence: Q99ZW2) and the C-terminal portion of the Cas9 protein comprises a portion of amino acids 574-1368 or 638-1368 of SpCas9 wild-type.

[0192] The C-terminal portion of the split Cas9 can be joined with the N-terminal portion of the split Cas9 to form a complete Cas9 protein. In some embodiments, the C-terminal portion of the Cas9 protein starts from where the N-terminal portion of the Cas9 protein ends. As such, in some embodiments, the C-terminal portion of the split Cas9 comprises a portion of amino acids (551-651)-1368 of spCas9. “(551-651)-1368” means starting at an amino acid between amino acids 551-651 (inclusive) and ending at amino acid 1368. For example, the C-terminal portion of the split Cas9 may comprise a portion of any one of amino acid 551-1368, 552-1368, 553-1368, 554-1368, 555-1368, 556-1368, 557-1368, 558-1368, 559-1368, 560-1368, 561-1368, 562-1368, 563-1368, 564-1368, 565-1368, 566-1368, 567-1368, 568-1368, 569-1368, 570-1368, 571-1368, 572-1368, 573-1368, 574-1368, 575-1368, 576-1368, 577-1368, 578-1368, 579-1368, 580-1368, 581-1368, 582-1368, 583-1368, 584-1368, 585-1368, 586-1368, 587-1368, 588-1368, 589-1368, 590-1368, 591-1368, 592-1368, 593-1368, 594-1368, 595-1368, 596-1368, 597-1368, 598-1368, 599-1368, 600-1368, 601-1368, 602-1368, 603-1368, 604-1368, 605-1368, 606-1368, 607-1368, 608-1368, 609-1368, 610-1368, 611-1368, 612-1368, 613-1368, 614-1368, 615-1368, 616-1368, 617-1368, 618-1368, 619-1368, 620-1368, 621-1368, 622-1368, 623-1368, 624-1368, 625-1368, 626-1368, 627-1368, 628-1368, 629-1368, 630-1368, 631-1368, 632-1368, 633-1368, 634-1368, 635-1368, 636-1368, 637-1368, 638-1368, 639-1368, 640-1368, 641-1368, 642-1368, 643-1368, 644-1368, 645-1368, 646-1368, 647-1368, 648-1368, 649-1368, 650-1368, or 651-1368 of spCas9. In some embodiments, the C-terminal portion of the split Cas9 protein comprises a portion of amino acids 574-1368 or 638-1368 of SpCas9.

[0193] By “subject” is meant a mammal, including, but not limited to, a human or non-human mammal, such as a bovine, equine, canine, ovine, or feline. Subjects include livestock, domesticated animals raised to produce labor and to provide commodities, such as food, including without limitation, cattle, goats, chickens, horses, pigs, rabbits, and sheep.

[0194] By “substantially identical” is meant a polypeptide or nucleic acid molecule exhibiting at least 50% identity to a reference amino acid sequence (for example, any one of the amino acid sequences described herein) or nucleic acid sequence (for example, any one of the nucleic acid sequences described herein). In one embodiment, such a sequence is at least 60%, 80% or 85%, 90%, 95% or even 99% identical at the amino acid level or nucleic acid to the sequence used for comparison.

[0195] Sequence identity is typically measured using sequence analysis software (for example, Sequence Analysis Software Package of the Genetics Computer Group, University of Wisconsin Biotechnology Center, 1710 University Avenue, Madison, Wis. 53705, BLAST, BESTFIT, GAP, or PILEUP/PRETTYBOX programs). Such software matches identical or similar sequences by assigning degrees of homology to various substitutions, deletions, and/or other modifications. Conservative substitutions typically include substitutions within the following groups: glycine, alanine; valine, isoleucine, leucine; aspartic acid, glutamic acid, asparagine, glutamine; serine, threonine; lysine, arginine; and phenylalanine, tyrosine. In an exemplary approach to determining the degree of identity, a BLAST program may be used, with a probability score between e⁻³ and e⁻¹⁰⁰ indicating a closely related sequence.

[0196] COBALT is used, for example, with the following parameters:
[0197] a) alignment parameters: Gap penalties-11,-1 and End-Gap penalties-5,-1,
[0198] b) CDD Parameters: Use RPS BLAST on; Blast E-value 0.003; Find Conserved columns and Recompute on, and
[0199] c) Query Clustering Parameters: Use query clusters on; Word Size 4; Max cluster distance 0.8; Alphabet Regular.

[0200] EMBOSS Needle is used, for example, with the following parameters:
[0201] a) Matrix: BLOSUM62;
[0202] b) GAP OPEN: 10;
[0203] c) GAP EXTEND: 0.5;
[0204] d) OUTPUT FORMAT: pair;
[0205] e) END GAP PENALTY: false;
[0206] f) END GAP OPEN: 10; and
[0207] g) END GAP EXTEND: 0.5.

[0208] The term “target site” refers to a sequence within a nucleic acid molecule that is modified by a nucleobase editor. In one embodiment, the target site is deaminated by a deaminase or a fusion protein comprising a deaminase (e.g., cytidine or adenine deaminase).

[0209] As used herein, the terms “treat,” treating,” “treatment,” and the like refer to reducing or ameliorating a disorder and/or symptoms associated therewith or obtaining a desired pharmacologic and/or physiologic effect. It will be appreciated that, although not precluded, treating a disorder or condition does not require that the disorder, condition or symptoms associated therewith be completely eliminated. In some embodiments, the effect is therapeutic, i.e., without limitation, the effect partially or completely reduces, diminishes, abrogates, abates, alleviates, decreases the intensity of, or cures a disease and/or adverse symptom attributable to the disease. In some embodiments, the effect is preventative, i.e., the effect protects or prevents an occurrence or reoccurrence of a disease or condition. To this end, the presently disclosed methods comprise administering a therapeutically effective amount of a compositions as described herein.

[0210] By “uracil glycosylase inhibitor” or “UGI” is meant an agent that inhibits the uracil-excision repair system. In one embodiment, the agent is a protein or fragment thereof that binds a host uracil-DNA glycosylase and prevents removal of uracil residues from DNA. In an embodiment, a UGI is a protein, a fragment thereof, or a domain that is capable of inhibiting a uracil-DNA glycosylase base-excision repair enzyme. In some embodiments, a UGI domain comprises a wild-type UGI or a modified version thereof. In some embodiments, a UGI domain comprises a fragment of the exemplary amino acid sequence set forth below. In some embodiments, a UGI fragment comprises an amino acid sequence that comprises at least 60%, at least 65%, at least 70%, at least 75%, at least 80%, at least 85%, at least 90%, at least 95%, at least 96%, at least 97%, at least 98%, at least 99%, or 100% of the exemplary UGI sequence provided below. In some embodiments, a UGI comprises an amino acid sequence that is homologous to the exemplary UGI amino acid sequence or fragment thereof, as set forth below. In some embodiments, the UGI, or a portion thereof, is at least 70%, at least 75%, at least 80%, at least 85%, at least 90%, at least 95%, at least 96%, at least 97%, at least 98%, at least 99%, at least 99.5%, at least 99.9%, or 100% identical to a wild-type UGI or a UGI sequence, or portion thereof, as set forth below. An exemplary UGI comprises an amino acid sequence as follows:

>splP14739IUNGI_BPPB2 Uracil-DNA glycosylase
inhibitor
MTNLSDIIEKETGKQLVIQESILMLPEEVEEVIGNKPESDILVHTAYDE
STDENVMLLTSDAPEYKPWALVIQDSNGENKIKML.

[0211] The term “vector” refers to a means of introducing a nucleic acid sequence into a cell, resulting in a transformed cell. Vectors include plasmids, transposons, phages, viruses, liposomes, and episome. “Expression vectors” are nucleic acid sequences comprising the nucleotide sequence to be expressed in the recipient cell. Expression vectors may include additional nucleic acid sequences to promote and/or facilitate the expression of the of the introduced sequence such as start, stop, enhancer, promoter, and secretion sequences.

[0212] Any compositions or methods provided herein can be combined with one or more of any of the other compositions and methods provided herein.

[0213] DNA editing has emerged as a viable means to modify disease states by correcting pathogenic mutations at the genetic level. Until recently, all DNA editing platforms have functioned by inducing a DNA double strand break (DSB) at a specified genomic site and relying on endogenous DNA repair pathways to determine the product outcome in a semi-stochastic manner, resulting in complex populations of genetic products. Though precise, user-defined repair outcomes can be achieved through the homology directed repair (HDR) pathway, a number of challenges have prevented high efficiency repair using HDR in therapeutically-relevant cell types. In practice, this pathway is inefficient relative to the competing, error-prone non-homologous end joining pathway. Further, HDR is tightly restricted to the G1 and S phases of the cell cycle, preventing precise repair of DSBs in post-mitotic cells. As a result, it has proven difficult or impossible to alter genomic sequences in a user-defined, programmable manner with high efficiencies in these populations.

[0214] Superoxide dismutase 1 (SOD1) is an enzymatic protein encoded by the SOD1 gene. The SOD1 enzyme is abundant in cells throughout the body. The SOD1 enzyme binds to copper (Cu) and zinc (Zn) to degrade toxic, charged oxygen molecules called superoxide radicals or reactive oxygen species (ROS), which are byproducts of normal cell processes that must be regularly degraded to avoid cell damage, transformation, or death. At least 200 mutations in the SOD1 gene have been found to cause amyotrophic lateral sclerosis (ALS), a condition characterized by progressive muscle weakness, a loss of muscle mass, and an inability to control movement. Most of these mutations alter one amino acid in the superoxide dismutase enzyme. Worldwide, SOD1 gene mutations cause 15 to 20 percent of familial ALS. About half of all Americans with ALS caused by SOD1 gene mutations have a particular mutation that replaces the amino acid residue alanine (A) with the amino acid residue valine (V) at position 5 in the enzyme, i.e., Ala5Val or A5V. ALS caused by the A5V mutation is generally associated with a shorter life expectancy compared with ALS caused by other genetic mutations.

[0215] ALS is caused by the death of nerve cells that control muscle movement (motor neurons). It is presently unclear why motor neurons are particularly sensitive to SOD1 gene mutations, although the large size of these types of neurons may contribute to their being more sensitive to disruption in normal SOD1 enzyme function. Several possible ways in which an altered SOD1 enzyme may cause the death of motor neurons include (i) an increase in harmful superoxide radicals in cells, particularly in lysosomes and/or proteosomes; (ii) increased production of other types of toxic radicals and increased cell death; and/or (iii) accumulation of clumps (aggregates) of misfolded superoxide dismutase that may be toxic to cells.

[0216] By “SOD1 protein” is meant a polypeptide or fragment thereof having at least about 95% amino acid sequence identity to NCBI Accession No. NP_000445. An exemplary human SOD1 amino acid sequence is provided below.

| | |
|---|---|
| 1 | MATKAVCVLK GDGPVQGIIN FEQKESNGPV KVWGSIKGLT EGLHGFHVHE FGDNTAGCTS |
| 61 | AGPHFNPLSR KHGGPKDEER HVGDLGNVTA DKDGVADVSI EDSVISLSGD HCIIGRTLVV |
| 121 | HEKADDLGKG GNEESTKTGN AGSRLACGVI GIAQ |

[0217] By “SOD1 polynucleotide” is meant a nucleic acid molecule encoding a SOD1 protein or fragment thereof. The genomic sequence of an exemplary human SOD1 polynucleotide, which is available at NCBI Accession No. NC_000021.9:31659622-31668931 (Homo sapiens chromosome 21, GRCh38.p13 Primary Assembly), is provided below (SEQ ID NO: 3).

| | |
|---|---|
| 1 | gtttggggcc agagtgggcg aggcgcggag gtctggccta taaagtagtc gcggagacgg |
| 61 | ggtgctggtt tgcgtcgtag tctcctgcag cgtctggggt ttccgttgca gtcctcggaa |
| 121 | ccaggacctc ggcgtggcct agcgagttat ggcgacgaag gccgtgtgcg tgctgaaggg |
| 181 | cgacggccca gtgcagggca tcatcaattt cgagcagaag gcaagggctg ggacggaggc |
| 241 | ttgtttgcga ggccgctccc acccgctcgt ccccccgcgc acctttgcta ggagcgggtc |
| 301 | gcccgccagg cctcggggcc gccctggtcc agcgcccggt cccggcccgt gccgcccggt |
| 361 | cggtgccttc gcccccagcg gtgcggtgcc caagtgctga gtcaccgggc gggcccgggc |
| 421 | gcggggcgtg ggaccgaggc cgccgcgggg ctgggcctgc gcgtggcggg agcgcgggga |
| 481 | gggattgccg cgggccgggg aggggcgggg gcgggcgtgc tgccctctgt ggtccttggg |
| 541 | ccgccgccgc gggtctgtcg tggtgcctgg agcggctgtg ctcgtccctt gcttggccgt |
| 601 | gttctcgttc ctgagggtcc cgcggacacc gagtggcgca gtgccaggcc cagcccgggg |
| 661 | atggcgactg cgcctgggcc cgcctggtgt cttcgcatcc ctctccgctt tccggcttca |
| 721 | gcgctctagg tcagggagtc ttcgcttttg tacagctcta aggctaggaa tggtttttat |
| 781 | atttttaaaa ggctttggaa aacaaaaata cgcaacagag accgtttgtg tgacactttg |
| 841 | cagggaagtt tgctggcctc tgttctaggt catgattggg ctgcaagggc agagaaggta |
| 901 | gccttgaaca gaggtccttt tcctcctcct aagctccggg agccagaggt ttaactgacc |
| 961 | cttttgggga tttttgaggg cagtgatctt aactttgggt gcacagttag cttatttgaa |
| 1021 | gatcttacta aaaatacacc agagcccaac ctccgaccaa ttacatcaaa acctgtccta |
| 1081 | gtgcagggtg agtattgctg ttttttgaaa gtttccaaaa gtgattttga tgtgcaccta |
| 1141 | cgattgagaa ctgtcgtttg aggacagtgg gtggagtttc gtatttggaa attagaagac |
| 1201 | ctggagtttc cattacaccg aattggcact taataactgt tgtcggagca tttcttaagc |
| 1261 | cacattttcg taaagtggct ttaaaattgc tctgccagta ggcaggttgc taagatggtc |
| 1321 | agagacaaac ttctgaacga ctcttgtaaa atatacagaa atattttcag aacttttatc |
| 1381 | agtaaaatta caaaacgtgt tgcaaggaag gtgcttgtga taacactgtc cccagaacct |
| 1441 | tagtgaagtt accaactggt ggaaaatttt ctcttgcact cggcttaaaa atcatgaggg |
| 1501 | aatatttact atacgaatga gattcagtct ttaaaggggt ttacagaaac gtgagaggac |
| 1561 | aggaacagtt agtctgtgta aatgtctgaa atatatgtga gggagataat gagtttagcc |
| 1621 | tttttcttta ataggtctcc agattttctg gaaaaggttc tttggcattt gactccattt |
| 1681 | tgctgtttca tttgtcagac ttctttttgt ccctctttac ttctccccac ataattcacc |
| 1741 | agtactagtg ttttgttttt cagaccaagt ctcgctctgt cgcccaggct ggagtgcagt |
| 1801 | ggcgcgatct cagctcactg caacctccgc ctcccaggtt caagcaattc tcctgcctca |
| 1861 | gcctcccggg tagctgggac tacaggcgcg cgccgccacg cctggctaat tttttatatt |
| 1921 | ttagtagaga cggcgtttca ccatgttggc caggatggtc tcgatctgtt gacgtcgtga |
| 1981 | tccacccgcc tcggcctccc aaagtgctgg gattacaggc gtgagccacc ccgcccggcc |
| 2041 | accagtgcta ttcttaagac gcctctgagg aatcccttct ccctggccat tgagaatcca |
| 2101 | tgcatgaacc caggttttcc accttccctg agcagcttgc atagttcctt cttttaagcg |
| 2161 | cctgacttcg ttttgtttgg tgcccgttgt acctgagaat gagccttgga tagtggagca |
| 2221 | ttccagcttt ccagatatgc agagataata cattggctat cagctacttg gcttggccta |
| 2281 | ttccgtgttt aaaatcttgg actctttgct agtttttaca gatcagaatt tttcacgtat |
| 2341 | taatccagtt ttcctagctt ctcttgaaga atttttggag atctcttcat actgagcctt |
| 2401 | cattagccca ggacagtact gctgtagcag ttcatatatt ttttcgcttc ccaggcctgt |
| 2461 | gttattcact taagttcata gcctggtccc tgcagggttg tacccgagca cagctactta |
| 2521 | gatgtcctga atgtattacc ggttaaatgg aggtttcaaa gaacctgctg tttttggccc |
| 2581 | tgtgctcttg ataacagagt gtttgaggga caactttcac atttgagttt ttccaaaatt |
| 2641 | aaaggttgta gaagagtcac agtatctatt gtcaaaaaga aaagaattta aaaaggcagc |
| 2701 | aattgccagg atacttcatt tgagcaatga tattttccag tggaaagtca catcttaagg |
| 2761 | gttaatgccc cttaactgtt ggccgtattt gaaaacaaac caagctaaaa acaagagaca |
| 2821 | ctgacatgtt gtatgacggt gtggtgtgga tgttgtgttt attttagtcc tgagatctag |
| 2881 | ttgtaacttc cttgatttct gtatgtagcc acggagcacc attacctgtc accattacct |
| 2941 | gaatggctat actgcttgct ttcattttgg tagagtggaa aggttaccta ggtttcagtg |
| 3001 | cttgaaaaga tttcagaaag cagtagtacg tctggttaga ctagaatcag tcctctcctg |
| 3061 | ggggcagtgg aatataatat tttctgactg ctaattaaaa atacctgtga tagccgggcg |
| 3121 | tggtggctta cgcctgtaat cccagcactt tgggaggccg agacgggtgg atcacgaggt |
| 3181 | cagcagatgg agaccatcct ggctaacacg gtgaaacccc gtctctacta aaaatgcaaa |
| 3241 | aaaattagcc gggtgtggtg gtgggcgcct gtagtcccag ctactcagga ggctgaggca |
| 3301 | ggagaatggc atgaacctgg gaggcggagc ttgcagtgag ccgagatcat gtcactgcac |
| 3361 | tccagcctgg gcgacagagc gagactcgtc tcaaaaaaaa aaagaaaaaa acttatgatg |
| 3421 | gacacttaaa aacactcact gagtggggag tggagagcag gggtcccagg gtagcctgtt |
| 3481 | ggacatttcc agggcgactt tttctttttt tttttttaaa gtcaagtgag tatgccatat |
| 3541 | ggaaaagggt gtgcgtggag aaaaagcaag gggctccaga gtgtaggatg agacatacac |
| 3601 | cttttgggtt aaaaaggctg aggcaggaga atggcgtgaa cccgggaggc ggagcttgca |
| 3661 | gtgagctgag atcatgccac tgcactccag cctgggcgac agagcgagac tcttgtctca |
| 3721 | aaataaaaaa cgtttacatg tacatgtata ttcaacatgt acaaatataa cctattcaaa |
| 3781 | agtatttact acataaatag gtacttacat tacctattta ctgtaatagt caaagcctat |
| 3841 | gaagtatcta acactgatgt gtaggtactc actttgcttg ccactctatt aggtgctttt |
| 3901 | tatgttattt aatcatgaag cctggccaca gggtgcttgt gcattgagtg tgggaacaag |
| 3961 | attaccatct cccttttgag gacacaggcc tagagcagtt aagcagcttg ctggaggttc |
| 4021 | actggctaga aagtggtcag cctgggattt ggacacagat ttttccactc ccaagtctgg |
| 4081 | ctgcttttta cttcactgtg aggggtaaag gtaaatcagc tgttttcttt gttcagaaac |
| 4141 | tctctccaac tttgcacttt tcttaaagga aagtaatgga ccagtgaagg tgtggggaag |
| 4201 | cattaaagga ctgactgaag gcctgcatgg attccatgtt catgagtttg gagataatac |
| 4261 | agcaggtggg tgttgtgctg tgctggtgac ccatacttgt tcaccctagt tagataaaca |
| 4321 | gtagagtagc ccctaaacgt taaaacccct caacttgttt ttgtttttga gaaagggtct |
| 4381 | tgctctgtcg ctcaggctgg agtgcagtgg cgctgtgcga tcatggctga ccttagcctt |
| 4441 | gacctcccag gctccattga tcctcatgcc ttggcccgta gctgggacta caggtacaca |
| 4501 | ccaccacgcc tggctaattt ttgtattttt ttctagaggt ggggtttcat catgttgccc |
| 4561 | aggctggtct tgaactgctg ggctcaagtg gtctatcctc ctcgacctcc caaagtgctg |
| 4621 | ggattacatg tgtgagccac tgtgcctggg aaaaccctca acttttcttt taaaaaagag |
| 4681 | gtcaacttta ttgtatataa gcactgtgct aaaattgcag gaactgggac catatcctga |
| 4741 | tttttgtaat aatgccagca gagtacacac aagaaaagta actgcactag attgtgaaga |
| 4801 | ctggggtgga cctgcttctg aaggtccagt gccctttgtc ttaagatttg gtgtagtgtg |
| 4861 | tctttagaaa ccaaaaaaag agaagaagat caaccttaag attagccaca aaactgggct |
| 4921 | ttgataccta ggtgtggaaa agaaagggaa agagttgatg ttttgtctta cagcatcatt |
| 4981 | gtagaagagg gtgttttttt gtttgtttgt tttttgagac ggagtcttac tctgtggccc |
| 5041 | aggctggagt gcagtggcgc gatctcggct cactgcaagc tccgcctccc gggttcatgc |
| 5101 | cattctcctg cctcagcccc ctgagtagct gggactacag gtgcccgcca ccccgcctgg |
| 5161 | ctaatttttt gtatttttag tagagacggg gtttcactgt gttagccaag atggtctctc |
| 5221 | tcctgacctc gtgatccgcc tgtctcagcc tcccaaagtg ctgggattac aggcatgagc |
| 5281 | caccgcaccc agccagaaga gggtgttttt taaagaaggc aaataggaaa taaaaacttg |
| 5341 | ggctcttaac ttttgtaatg atcccaggtg tttgagctgg gggttgaggg tgggtgcctc |
| 5401 | gagcaaaggg gctgcattta tttgcataat gccatgtaag agtagctcta caccccaaac |
| 5461 | acaggcttct tagtgggacc aaagtatgat acaaactgaa gatggaatgc agaggattat |
| 5521 | tggtactttg gaatatgctt aaaaaaaatt tttttaaagt atttttaaaa aatcaggcaa |
| 5581 | cccctgaacc agagtaggtt cagagaaact gccaaatttt attttcttaa tttgggattg |
| 5641 | gaagcaagtt aacagaagtt tatgagttaa gttgcattta gtgatctttt gccatatttg |
| 5701 | agtaataatc tgattttttt gtttatagat ttcttcttaa attaacttta ttcatcttgc |
| 5761 | taatttagtt tcaaatagtg atttgtaatg atcagatttg atccatttct gtaattgctg |
| 5821 | aaattccccc gagttgcttt ttggctttac cgcctctggt ctgggaggtg attgctctgc |
| 5881 | tgcttcctgt aacttgcctg cctttctccc tgtgtgggac tcctgcgggt gagagcgtgg |
| 5941 | ctgaagacag ccgtgttatg aaagggcctc ctgtgctgtc gaggttgtgc tctgtgaatg |
| 6001 | tcatcccctg gtgcacagca gcaccttcta cacaggatac agttggaatg ccgccccctc |
| 6061 | gagttgtgta aggcagcagc cttggccctt gcacataaga tgctgttgaa tattctgcct |
| 6121 | gcaccaagta aagggcacag atagaactgc ttggcatatg ttgctgggga gatgagtttt |
| 6181 | ttgtaaagta tactacgttc ttaagaattt ggatcataac catgggattt taataataga |
| 6241 | aaaactgttg aagatcagtc tggtccctta tttttacagt gaagaagcca aagcccagag |
| 6301 | aagggtgtta actttacaag tgtcagacag tagttagaac ttggtggggt tttttttttt |
| 6361 | ttttttttga gatggagtct tgctctgttg cccaggctgg agtgcagtgg tgcgatctca |
| 6421 | gctcactgca acctctgcct cccaggttca agcgattctc ctgcctcagc ctactaagta |
| 6481 | gctgggacta taggtgcgca ccaccacgcc tagctaattt ttgtattttt tcagtagaga |
| 6541 | cagggttttg ctatgctggc caggctggtc tcaaactcct gacctcagat gatccagcca |
| 6601 | cctcagcttc ccaaagtgct ggggttccag gtgttagcca ccatgcctgg ccatagactt |
| 6661 | gtttctgttc ccttctcact gtggctgtac caaggtgttg cttatcccag aagtcgtgat |
| 6721 | gcaggtcagc actttctcca tgggaagttt tagcagtgtt tctttttaga atgtatttgg |
| 6781 | gaactttaat tcataattta gctttttttt cttcttctta taaataggct gtaccagtgc |
| 6841 | aggtcctcac tttaatcctc tatccagaaa acacggtggg ccaaaggatg aagagaggta |
| 6901 | acaagatgct taactcttgt aataatggcg atagctttct ggagttcata tggtatacta |
| 6961 | cttgtaaata tgtgctaaga taattccgtg tttcccccac ctttgctttt gaacttgctg |
| 7021 | actcatctaa acccctgctc ccaaatgctg gaatgctttt acttcctggg cttaaaggaa |
| 7081 | ttgacaaatg gggacactta aaacgatttg gttttgtagc atttattgaa tatagaacta |
| 7141 | atacaagtgc caaaggggaa ctaatacagg aaatgtcatg aacagtactg tcaaccacta |
| 7201 | gcaaaatcaa tcatcattgt gaaacatagg aagcttctgt agataaaaaa aaaaattgat |
| 7261 | actgaaaact agtcgagact ccatttatat gtgtatgttt tctgaaagcc tttcagaaaa |
| 7321 | atattaaatt taaggacaag atttttatat cagaggcctt gggacatagc tttgttagct |
| 7381 | atgccagtaa ttaacaggca taactcagta actgagagtt taccctttgg tacttctgaa |
| 7441 | atcaggtgca gccccatctt tcttcccaga gcattagtgt gtagacgtga agccttgttt |
| 7501 | gaagagctgt atttagaatg cctagctact tgtttgcaaa tttgtgtcta ctcagtcaag |
| 7561 | ttttaattta gctcatgaac taccttgatg tttagtggca tcagccctaa tccatctgat |
| 7621 | gctttttcat tattaggcat gttggagact tgggcaatgt gactgctgac aaagatggtg |
| 7681 | tggccgatgt gtctattgaa gattctgtga tctcactctc aggagaccat tgcatcattg |
| 7741 | gccgcacact ggtggtaagt tttcataaaa ggatatgcat aaaacttctt ctaacataca |
| 7801 | gtcatgtatc ttttcacttt gattgttagt cgcggtttct aaagatccag ataaactgta |
| 7861 | cttgcagttc aaattaggaa aagcaatttt attggacaat tacggtgaaa atgaattatt |
| 7921 | ttatctaggt cagttaagaa cactgttctg ctaagatgca gtaaaaagca ggttacattt |
| 7981 | gaccatatta gatctgagtt tggaaaacag aagtagtctt tagttttaaa atggccagat |
| 8041 | tttcttgcca ggattgggtt tctcacttgt taaacagaac attttgttaa gtttaaaacc |
| 8101 | tgggatggac ttaagtattc atgttcattc atgttcattc aggactgcag gttatcatga |
| 8161 | cttgtttaac ttgtgggaag ctgttgtccc aagttatcct ggggaactgc atctggttct |
| 8221 | tgcaaaacac caagtagaca ggctctcttt tacctcccct tgagggcatt aacattcagt |
| 8281 | agtcacttcc attcagttaa ccctttattt ttatggtttt tcttgagcca tagttgtaaa |
| 8341 | gcagaaaaat catttataaa ggtttgttga acaaaattca aaatactgtt gcttaaagta |
| 8401 | ttaagatttt ttaggattat accttactta taggcccgtc attcatttgg catgaaattt |
| 8461 | tgagttttat tcactttcac tttccttttt ttccaaagca attaaaaaaa ctgccaaagt |
| 8521 | aagagtgact gcggaactaa ggttactgta acttaccatg gaggattaag ggtagcgtgt |
| 8581 | ggtggtctac aacatagtta tttgggtttt agtatttcat ttagacagca acacttacct |
| 8641 | aatgtttaaa ggtaatgtct ttgcaacacc aagaaaaagc tttgagtagt agtttctact |
| 8701 | tttaaactac taaatattag tatatctctc tactaggatt aatgttattt ttctaatatt |
| 8761 | atgaggttct taaacatctt ttgggtattg ttgggaggag gtagtgatta cttgacagcc |
| 8821 | caaagttatc ttcttaaaat tttttacagg tccatgaaaa agcagatgac ttgggcaaag |
| 8881 | gtggaaatga agaaagtaca aagacaggaa acgctggaag tcgtttggct tgtggtgtaa |
| 8941 | ttgggatcgc ccaataaaca ttcccttgga tgtagtctga ggccccttaa ctcatctgtt |
| 9001 | atcctgctag ctgtagaaat gtatcctgat aaacattaaa cactgtaatc ttaaaagtgt |
| 9061 | aattgtgtga ctttttcaga gttgctttaa agtacctgta gtgagaaact gatttatgat |
| 9121 | cacttggaag atttgtatag ttttataaaa ctcagttaaa atgtctgttt caatgacctg |
| 9181 | tattttgcca gacttaaatc acagatgggt attaaacttg tcagaatttc tttgtcattc |
| 9241 | aagcctgtga ataaaaaccc tgtatggcac ttattatgag gctattaaaa gaatccaaat |
| 9301 | tcaaactaaa |

[0218] In the above SOD1 genomic nucleic acid sequence, the “ag” splice acceptor site at the 5′ end of exon 3 of the SOD1 gene is in bold font. The nucleic acid sequence of exon 3 of the SOD1 gene is indicated in italics and by double underlining in the above SOD1 genomic sequence.

[0219] The mRNA/cDNA sequence of an exemplary human SOD1 polynucleotide, which is available at NCBI Reference Sequence: NM_000454.4, is provided below:

gcgtcgtag tctcctgcag cgtctggggt ttccgttgca
gtcctcggaa ccaggacctc ggcgtggcct agcgagttat
ggcgacgaag gccgtgtgcg tgctgaaggg cgacggccca
gtgcagggca tcatcaattt cgagcagaag gaaagtaatg
gaccagtgaa ggtgtgggga agcattaaag gactgactga
aggcctgcat ggattccatg ttcatgagtt tggagataat
acagcaggct gtaccagtgc aggtcctcac tttaatcctc
tatccagaaa acacggtggg ccaaaggatg aagagaggca
tgttggagac ttgggcaatg tgactgctga caaagatggt
gtggccgatg tgtctattga agattctgtg atctcactct
caggagacca ttgcatcatt ggccgcacac tggtggtcca
tgaaaaagca gatgacttgg gcaaaggtgg aaatgaagaa
agtacaaaga caggaaacgc tggaagtcgt ttggcttgtg
gtgtaattgg gatcgcccaa taaacattcc cttggatgta
gtctgaggcc ccttaactca tctgttatcc tgctagctgt
agaaatgtat cctgataaac attaaacact gtaatcttaa
aagtgtaatt gtgtgacttt ttcagagttg ctttaaagta
cctgtagtga gaaactgatt tatgatcact tggaagattt
gtatagtttt ataaaactca gttaaaatgt ctgtttcaat
gacctgtatt ttgccagact taaatcacag atgggtatta
aacttgtcag aatttctttg tcattcaagc ctgtgaataa
aaaccctgta tggcacttat tatgaggcta ttaaaagaat
ccaaattcaa actaaaaaaa aaaaaaaaaa a

[0220] By “Androgen Receptor (AR) polynucleotide” is meant any polynucleotide encoding an androgen receptor polypeptide. An exemplary androgen receptor polynucleotide is provided below (SEQ ID NO: 4):

Homo sapiens androgen receptor (AR),
transcript variant 1, mRNA (NM_000044.6)
ATGGAAGTGCAGTTAGGGCTGGGAAGGGTCTACCCT
CGGCCGCCGTCCAAGACCTACCGAGGAGCTTTCCA
GAATCTGTTCCAGAGCGTGCGCGAAGTGATCCAGA
ACCCGGGCCCCAGGCACCCAGAGGCCGCGAGCGCA
GCACCTCCCGGCGCCAGTTTGCTGCTGCTGCAGCA
GCAGCAGCAGCAGCAGCAGCAGCAGCAGCAGCAGC
AGCAGCAGCAGCAGCAGCAGCAGCAGCAAGAGACT
AGCCCCAGGCAGCAGCAGCAGCAGCAGGGTGAGGA
TGGTTCTCCCCAAGCCCATCGTAGAGGCCCCACAG
GCTACCTGGTCCTGGATGAGGAACAGCAACCTTCA
CAGCCGCAGTCGGCCCTGGAGTGCCACCCCGAGAG
AGGTTGCGTCCCAGAGCCTGGAGCCGCCGTGGCCG
CCAGCAAGGGGCTGCCGCAGCAGCTGCCAGCACCT
CCGGACGAGGATGACTCAGCTGCCCCATCCACGTT
GTCCCTGCTGGGCCCCACTTTCCCCGGCTTAAGCA
GCTGCTCCGCTGACCTTAAAGACATCCTGAGCGAG
GCCAGCACCATGCAACTCCTTCAGCAACAGCAGCA
GGAAGCAGTATCCGAAGGCAGCAGCAGCGGGAGAG
CGAGGGAGGCCTCGGGGGCTCCCACTTCCTCCAAG
GACAATTACTTAGGGGGCACTTCGACCATTTCTGA
CAACGCCAAGGAGTTGTGTAAGGCAGTGTCGGTGT
CCATGGGCCTGGGTGTGGAGGCGTTGGAGCATCTG
AGTCCAGGGGAACAGCTTCGGGGGGATTGCATGTA
CGCCCCACTTTTGGGAGTTCCACCCGCTGTGCGTC
CCACTCCTTGTGCCCCATTGGCCGAATGCAAAGGT
TCTCTGCTAGACGACAGCGCAGGCAAGAGCACTGA
AGATACTGCTGAGTATTCCCCTTTCAAGGGAGGTT
ACACCAAAGGGCTAGAAGGCGAGAGCCTAGGCTGC
TCTGGCAGCGCTGCAGCAGGGAGCTCCGGGACACT
TGAACTGCCGTCTACCCTGTCTCTCTACAAGTCCG
GAGCACTGGACGAGGCAGCTGCGTACCAGAGTCGC
GACTACTACAACTTTCCACTGGCTCTGGCCGGACC
GCCGCCCCCTCCGCCGCCTCCCCATCCCCACGCTC
GCATCAAGCTGGAGAACCCGCTGGACTACGGCAGC
GCCTGGGCGGCTGCGGCGGCGCAGTGCCGCTATGG
GGACCTGGCGAGCCTGCATGGCGCGGGTGCAGCGG
GACCCGGTTCTGGGTCACCCTCAGCCGCCGCTTCC
TCATCCTGGCACACTCTCTTCACAGCCGAAGAAGG
CCAGTTGTATGGACCGTGTGGTGGTGGTGGGGGTG
GTGGCGGCGGCGGCGGCGGCGGCGGCGGCGGCGGC
GGCGGCGGCGGCGGCGGCGAGGCGGGAGCTGTAGC
CCCCTACGGCTACACTCGGCCCCCTCAGGGGCTGG
CGGGCCAGGAAAGCGACTTCACCGCACCTGATGTG
TGGTACCCTGGCGGCATGGTGAGCAGAGTGCCCTA
TCCCAGTCCCACTTGTGTCAAAAGCGAAATGGGCC
CCTGGATGGATAGCTACTCCGGACCTTACGGGGAC
ATGCGTTTGGAGACTGCCAGGGACCATGTTTTGCC
CATTGACTATTACTTTCCACCCCAGAAGACCTGCC
TGATCTGTGGAGATGAAGCTTCTGGGTGTCACTAT
GGAGCTCTCACATGTGGAAGCTGCAAGGTCTTCTT
CAAAAGAGCCGCTGAAGGGAAACAGAAGTACCTGT
GCGCCAGCAGAAATGATTGCACTATTGATAAATTC
CGAAGGAAAAATTGTCCATCTTGTCGTCTTCGGAA
ATGTTATGAAGCAGGGATGACTCTGGGAGCCCGGA
AGCTGAAGAAACTTGGTAATCTGAAACTACAGGAG
GAAGGAGAGGCTTCCAGCACCACCAGCCCCACTGA
GGAGACAACCCAGAAGCTGACAGTGTCACACATTG
AAGGCTATGAATGTCAGCCCATCTTTCTGAATGTC
CTGGAAGCCATTGAGCCAGGTGTAGTGTGTGCTGG
ACACGACAACAACCAGCCCGACTCCTTTGCAGCCT
TGCTCTCTAGCCTCAATGAACTGGGAGAGAGACAG
CTTGTACACGTGGTCAAGTGGGCCAAGGCCTTGCC
TGGCTTCCGCAACTTACACGTGGACGACCAGATGG
CTGTCATTCAGTACTCCTGGATGGGGCTCATGGTG
TTTGCCATGGGCTGGCGATCCTTCACCAATGTCAA
CTCCAGGATGCTCTACTTCGCCCCTGATCTGGTTT
TCAATGAGTACCGCATGCACAAGTCCCGGATGTAC
AGCCAGTGTGTCCGAATGAGGCACCTCTCTCAAGA
GTTTGGATGGCTCCAAATCACCCCCCAGGAATTCC
TGTGCATGAAAGCACTGCTACTCTTCAGCATTATT
CCAGTGGATGGGCTGAAAAATCAAAAATTCTTTGA
TGAACTTCGAATGAACTACATCAAGGAACTCGATC
GTATCATTGCATGCAAAAGAAAAAATCCCACATCC
TGCTCAAGACGCTTCTACCAGCTCACCAAGCTCCT
GGACTCCGTGCAGCCTATTGCGAGAGAGCTGCATC
AGTTCACTTTTGACCTGCTAATCAAGTCACACATG
GTGAGCGTGGACTTTCCGGAAATGATGGCAGAGAT
CATCTCTGTGCAAGTGCCCAAGATCCTTTCTGGGA
AAGTCAAGCCCATCTATTTCCACACCCAG

### BRIEF DESCRIPTION OF THE DRAWINGS

[0221] FIGS. 1A-1C depict plasmids. FIG. 1A is an expression vector encoding a TadA7.10-dCas9 base editor. FIG. 1B is a plasmid comprising nucleic acid molecules encoding proteins that confer chloramphenicol resistance (CamR) and spectinomycin resistance (SpectR). The plasmid also comprises a kanamycin resistance gene disabled by two point mutations. FIG. 1C is a plasmid comprising nucleic acid molecules encoding proteins that confer chloramphenicol resistance (CamR) and spectinomycin resistance (SpectR). The plasmid also comprises a kanamycin resistance gene disabled by three point mutations.

[0222] FIG. 2 is an image of bacterial colonies transduced with the expression vectors depicted in FIG. 1, which included a defective kanamycin resistance gene. The vectors contained ABE7.10 variants that were generated using error prone PCR. Bacterial cells expressing these “evolved” ABE7.10 variants were selected for kanamycin resistance using increasing concentrations of kanamycin. Bacteria expressing ABE7.10 variants having adenosine deaminase activity were capable of correcting the mutations introduced into the kanamycin resistance gene, thereby restoring kanamycin resistance. The kanamycin resistant cells were selected for further analysis.

[0223] FIGS. 3A and 3B illustrate editing of a regulatory region of the hemoglobin subunit gamma (HGB1) locus, which is a therapeutically relevant site for upregulation of fetal hemoglobin. FIG. 3A is a drawing of a portion of the regulatory region for the HGB1 gene. FIG. 3B quantifies the efficiency and specificity of adenosine deaminase variants. Editing is assayed at the hemoglobin subunit gamma 1 (HGB1) locus in HEK293T cells, which is therapeutically relevant site for upregulation of fetal hemoglobin. The top panel depicts nucleotide residues in the target region of the regulatory sequence of the HGB1 gene. A5, A8, A9, and A11 denote the edited adenosine residues in HGB1.

[0224] FIG. 4 illustrates the relative effectiveness of adenosine base editors comprising a dCas9 that recognizes a noncanonical PAM sequence. The top panel depicts the coding sequence of the hemoglobin subunit. The bottom panel is a graph demonstrating the efficiency of adenosine deaminase variant base editors with guide RNAs of varying lengths.

[0225] FIG. 5 is a graph illustrating the efficiency and specificity of ABE8 base editors. The percent editing at intended target nucleotides and unintended target nucleotides (bystanders) is quantified.

[0226] FIG. 6 is a graph illustrating the efficiency and specificity of ABE8 base editors. The percent editing at intended target nucleotides and unintended target nucleotides (bystanders) is quantified.

[0227] FIGS. 7A-7D depict eighth generation adenine base editors mediate superior A⋅T to G⋅C conversion in human cells. FIG. 7A illustrates an overview of adenine base editing: i) ABE8 creates an R-loop at a sgRNA-targeted site in the genome; ii) TadA* deaminase chemically converts adenine to inosine via hydrolytic deamination on the ss-DNA portion of the R-loop; iii) D10A nickase of Cas9 nicks the strand opposite of the inosine containing strand; iv) the inosine containing strand can be used as a template during DNA replication; v) inosine preferentially base pairs with cytosine in the context of DNA polymerases; and vi) following replication, inosine may be replaced by guanosine. FIG. 7B illustrates the architecture of ABE8.x-m and ABE8.x-d. FIG. 7C illustrates three perspectives of the E. coli TadA deaminase (PDB 1Z3A) aligned with the S. aureus TadA (not shown) complexed with tRNAArg2 (PDB 2B3J). Mutations identified in eighth round of evolution are highlighted. FIG. 7D are graphs depicting A⋅T to G⋅C base editing efficiencies of core ABE8 constructs relative to ABE7.10 constructs in Hek293T cells across eight genomic sites. Values and error bars reflect the mean and s.d. of three independent biological replicates performed on different days.

[0228] FIGS. 8A-8C depict Cas9 PAM-variant ABE8s and catalytically dead Cas9 ABE8 variants mediate higher A⋅T to G⋅C conversion than corresponding ABE7.10 variants in human cells. Values and error bars reflect the mean and s.d. of three independent biological replicates performed on different days. FIG. 8A is a graph depicting A⋅T to G⋅C conversion in Hek293T cells with NG-Cas9 ABE8s (-NG PAM). FIG. 8B is a graph depicting A⋅T to G⋅C conversion in Hek293T cells with Sa-Cas9 ABE8s (-NNGRRT PAM). FIG. 8C is a graph depicting A⋅T to G⋅C conversion in Hek293T cells with catalytically inactivated, dCas9-ABE8s (D10A, H840A in S. pyogenes Cas9).

[0229] FIGS. 9A-9E depict the comparison between the on- and off-target editing frequencies between ABE7.10, ABEmax and ABEmax with one BPNLS in Hek293T cells. Individual data points are shown and error bars represent s.d. for n=3 independent biological replicates, performed on different days. FIGS. 9A and 9B are graphs that depict on-target DNA editing frequencies. FIGS. 9C and 9D are graphs that depict sgRNA-guided DNA-off-target editing frequencies. FIG. 9E is a graph depicting RNA off-target editing frequencies.

[0230] FIGS. 10A-10B depict the median A⋅T to G⋅C conversion and corresponding INDEL formation of TadA, C-terminal alpha-helix truncation ABE constructs in HEK293T cells.

[0231] FIG. 10A is a heat map depicting A⋅T to G⋅C median editing conversion across 8 genomic sites. FIG. 10B is a heat map depicting INDEL formation. Delta residue value corresponds to deletion position in TadA. Median value generated from n=3 biological replicate.

[0232] FIG. 11 are heat maps depicting the median A⋅T to G⋅C conversion of 40 ABE8 constructs in HEK293T cells across 8 genomic sites. Median values were determined from two or greater biological replicates.

[0233] FIG. 12 is a heat map depicting median INDEL % of 40 ABE8 constructs in HEK293T cells across 8 genomic sites. Median values were determined from two or greater biological replicates.

[0234] FIG. 13 is a graph depicting fold change in editing, ABE8:ABE7. Representation of average ABE8:ABE7 A⋅T to G⋅C editing in Hek293T cells across all A positions within the target of eight different genomic sites. Positions 2-12 denote location of a target adenine within the 20-nt protospacer with position 20 directly 5′ of the -NGG PAM.

[0235] FIG. 14 depicts a dendrogram of ABE8s. Core ABE8 constructs selected for further studies highlighted in in black.

[0236] FIG. 15 are heat maps depicting median A⋅T to G⋅C conversion of core eight ABE8 constructs in HEK293T cells across 8 genomic sites. Median values were determined from three or greater biological replicates.

[0237] FIG. 16 is a heat map depicting median INDEL frequency of core 8 ABE8s tested at 8 genomic sites in HEK293T cells.

[0238] FIG. 17 are heat maps depicting median A⋅T to G⋅C conversion of core NG-ABE8 constructs 9 (-NG PAM) at six genomic sites in HEK293T cells. Median value generated from n=3 biological replicate.

[0239] FIG. 18 is a heat map depicting median INDEL frequency of core NG-ABE8s tested at six genomic sites in HEK293T cells. Median value generated from n=3 biological replicate.

[0240] FIG. 19 are heat maps depicting median A⋅T to G⋅C conversion of core Sa-ABE8 constructs (-NNGRRT PAM) at six genomic sites in HEK293T cells. Site positions are numbered −2 to 20 (5′ to 3′) within the 22-nt protospacer. Position 20 is 5′ to the NNGRRT PAM. Median value generated from n=3 biological replicate.

[0241] FIG. 20 is a heat map depicting median INDEL frequency of core Sa-ABE8s tested at 8 genomic sites in HEK293T cells. Median value generated from n=3 biological replicate.

[0242] FIG. 21 are heat maps depicting median A⋅T to G⋅C conversion of core dC9-ABE8-m constructs at eight genomic sites in HEK293T cells. Dead Cas9 (dC9) is defined as D10A and H840A mutations within S. pyogenes Cas9. Median value generated from n23 biological replicate.

[0243] FIG. 22 are heat maps depicting median A⋅T to G⋅C conversion of core dC9-ABE8-d constructs at eight genomic sites in HEK293T cells. Dead Cas9 (dC9) is defined as D10A and H840A mutations within S. pyogenes Cas9. Median value generated from n≥3 biological replicate.

[0244] FIGS. 23A and 23B depict Median INDEL frequency of core dC9-ABE8s tested at 8 genomic sites in HEK293T cells. Median value generated from n23 biological replicate. FIG. 23A is a heat map depicting indel frequency shown for dC9-ABE8-m variants relative to ABE7.10. FIG. 23B is a heat map depicting indel frequency shown for dC9-ABE8-d variants relative to ABE7.10.

[0245] FIG. 24 is a graph depicting C⋅G to T⋅A editing with Hek293T cells treated with ABE8s and ABE7.10. Editing frequencies for each site averaged across all C positions within the target. Cytosines within the protospacer are indicted with shading.

[0246] FIGS. 25A-25H depict DNA on-target and sgRNA-dependent DNA off-target editing by ABE8 constructs and ABE8 constructs with TadA mutations to improve specificity for DNA. Individual data points are shown and error bars represent s.d. for n=3 independent biological replicates, performed on different days. FIGS. 25A and 25B are graph depicting on-target DNA editing frequencies for core ABE8 constructs as compared to ABE7. FIGS. 25C and 25D are graphs depicting on-target DNA editing frequencies for ABE8 with mutations that improve RNA off-target editing. FIGS. 25E and 25F are graphs depicting sgRNA-guided DNA-off-target editing frequencies for core ABE 8 constructs as compared to ABE7. FIGS. 25G and 25H are graphs depicting sgRNA-guided DNA-off-target editing frequencies for ABE 8 constructs with mutations that improve RNA off-target editing.

[0247] FIG. 26 is a graph depicting indel frequencies at 12 previously identified sgRNA-dependent Cas9 off-target loci in human cells Individual data points are shown and error bars represent s.d. for n=3 independent biological replicates, performed on different days.

[0248] FIGS. 27A and 27B depict A⋅T to G⋅C conversion and phenotypic outcomes in primary cells. FIG. 27A is a graph depicting A⋅T to G⋅C conversion at −198 HBG1/2 site in CD34+ cells treated with ABE from two separate donors. NGS analysis conducted at 48 and 144h post treatment. −198 HBG1/2 target sequence shown with A7 highlighted. Percent A⋅T to G⋅C plotted for A7. FIG. 27B is a graph depicting percentage of 7-globin formed as a fraction of alpha-globin. Values shown from two different donors, post ABE treatment and erythroid differentiation.

[0249] FIGS. 28A and 28B depict A⋅T to G⋅C conversion of CD34+ cells treated with ABE8 at the −198 promoter site upstream of HBG1/2. FIG. 28A is a heat map depicting A to G editing frequency of ABE8s in CD34+ cells from two donors, where Donor 2 is heterozygous for sickle cell disease, at 48 and 144h post editor treatment. FIG. 28B is a graphical representation of distribution of total sequencing reads which contain either A7 only edits or combined (A7+A8) edits.

[0250] FIG. 29 is a heat map depicting INDEL frequency of CD34+ cells treated with ABE8 at the −198 site of the gamma-globin promoter. Frequencies shown from two donors at 48h and 144h time points.

[0251] FIG. 30 depicts an UHPLC UV-Vis trace (220 nm) and integration of globin chain levels of untreated differentiated CD34+ cells (donor 1).

[0252] FIG. 31 depicts an UHPLC UV-Vis trace (220 nm) and integration of globin chain levels of differentiated CD34+ cells treated with ABE7.10-m (donor1)

[0253] FIG. 32 depicts an UHPLC UV-Vis trace (220 nm) and integration of globin chain levels of differentiated CD34+ cells treated with ABE7.10-d (donor1).

[0254] FIG. 33 depicts an UHPLC UV-Vis trace (220 nm) and integration of globin chain levels of differentiated CD34+ cells treated with ABE8.8-m (donor1) FIG. 34 depicts an UHPLC UV-Vis trace (220 nm) and integration of globin chain levels of differentiated CD34+ cells treated with ABE8.8-d (donor1).

[0255] FIG. 35 depicts an UHPLC UV-Vis trace (220 nm) and integration of globin chain levels of differentiated CD34+ cells treated with ABE8.13-m (donor1).

[0256] FIG. 36 depicts an UHPLC UV-Vis trace (220 nm) and integration of globin chain levels of differentiated CD34+ cells treated with ABE8.13-d (donor1).

[0257] FIG. 37 depicts an UHPLC UV-Vis trace (220 nm) and integration of globin chain levels of differentiated CD34+ cells treated with ABE8.17-m (donor1).

[0258] FIG. 38 depicts an UHPLC UV-Vis trace (220 nm) and integration of globin chain levels of differentiated CD34+ cells treated with ABE8.17-d (donor1).

[0259] FIG. 39 depicts an UHPLC UV-Vis trace (220 nm) and integration of globin chain levels of differentiated CD34+ cells treated with ABE8.20-m (donor1).

[0260] FIG. 40 depicts an UHPLC UV-Vis trace (220 nm) and integration of globin chain levels of differentiated CD34+ cells treated with ABE8.20-d (donor 1).

[0261] FIG. 41 depicts an UHPLC UV-Vis trace (220 nm) and integration of globin chain levels of differentiated CD34+ cells untreated (donor 2). Note: donor 2 is heterozygous for sickle cell disease.

[0262] FIG. 42 depicts an UHPLC UV-Vis trace (220 nm) and integration of globin chain levels of differentiated CD34+ cells treated with ABE7.10-m (donor 2). Note: donor 2 is heterozygous for sickle cell disease.

[0263] FIG. 43 depicts an UHPLC UV-Vis trace (220 nm) and integration of globin chain levels of differentiated CD34+ cells treated with ABE7.10-d (donor 2). Note: donor 2 is heterozygous for sickle cell disease.

[0264] FIG. 44 depicts an UHPLC UV-Vis trace (220 nm) and integration of globin chain levels of differentiated CD34+ cells treated with ABE8.8-m (donor 2). Note: donor 2 is heterozygous for sickle cell disease.

[0265] FIG. 45 depicts an UHPLC UV-Vis trace (220 nm) and integration of globin chain levels of differentiated CD34+ cells treated with ABE8.8-d (donor 2). Note: donor 2 is heterozygous for sickle cell disease.

[0266] FIG. 46 depicts an UHPLC UV-Vis trace (220 nm) and integration of globin chain levels of differentiated CD34+ cells treated with ABE8.13-m (donor 2). Note: donor 2 is heterozygous for sickle cell disease.

[0267] FIG. 47 depicts an UHPLC UV-Vis trace (220 nm) and integration of globin chain levels of differentiated CD34+ cells treated with ABE8.13-d (donor 2). Note: donor 2 is heterozygous for sickle cell disease.

[0268] FIG. 48 depicts an UHPLC UV-Vis trace (220 nm) and integration of globin chain levels of differentiated CD34+ cells treated with ABE8.17-m (donor 2). Note: donor 2 is heterozygous for sickle cell disease.

[0269] FIG. 49 depicts an UHPLC UV-Vis trace (220 nm) and integration of globin chain levels of differentiated CD34+ cells treated with ABE8.17-d (donor 2). Note: donor 2 is heterozygous for sickle cell disease.

[0270] FIG. 50 depicts an UHPLC UV-Vis trace (220 nm) and integration of globin chain levels of differentiated CD34+ cells treated with ABE8.20-m (donor 2). Note: donor 2 is heterozygous for sickle cell disease.

[0271] FIG. 51A-51E depict editing with ABE8.8 at two independent sites reached over 90% editing on day 11 post erythroid differentiation before enucleation and about 60% of gamma globin over alpha globin or total beta family globin on day 18 post erythroid differentiation.

[0272] FIG. 51A is a graph depicting an average of ABE8.8 editing in 2 healthy donors in 2 independent experiments. Editing efficiency was measured with primers that distinguish HBG1 and HBG2. FIG. 51B is a graph depicting an average of 1 healthy donor in 2 independent experiments. Editing efficiency was measured with primers that recognize both HBG1 and HBG2. FIG. 51C is a graph depicting editing of ABE8.8 in a donor with heterozygous E6V mutation. FIGS. 51D and 51E are graphs depicting gamma globin increase in the ABE8.8 edited cells.

[0273] FIGS. 52A and 52B depict percent editing using ABE variants to correct sickle cell mutations. FIG. 52A is a graph depicting a screen of different editor variants with about 70% editing in SCD patient fibroblasts. FIG. 52B is a graph depicting CD34 cells from healthy donors edited with a lead ABE variant, targeting a synonymous mutation A13 in an adjacent proline that resides within the editing window and serves as a proxy for editing the SCD mutation. ABE8 variants showed an average editing frequency around 40% at the proxy A13.

[0274] FIGS. 53A and 53B depict RNA amplicon sequencing to detect cellular A-to-I editing in RNA associated with ABE treatment. Individual data points are shown and error bars represent s.d. for n=3 independent biological replicates, performed on different days. FIG. 53A is a graph depicting A-to-I editing frequencies in targeted RNA amplicons for core ABE 8 constructs as compared to ABE7 and Cas9(D10A) nickase control. FIG. 53B is a graph depicting A-to-I editing frequencies in targeted RNA amplicons for ABE8 with mutations that have been reported to improve RNA off-target editing.

[0275] FIG. 54 is a bar graph depicting the total percent of A-to-G base editing at the splice acceptor target site (AG nucleic acid site) achieved by the adenosine base editors (ABE8 variants) assayed versus controls. The Protospacer PAM sequence for the ABE assessed was NGG ABE.

[0276] FIG. 55 depicts a diagramic illustration of the exon 3 splice acceptor of the SOD1 genomic nucleic acid sequence as a target for A-to-G nucleotide change to cause splice disruption of transcription of SOD1 exon 3. Shown in the figure are the numeric genomic DNA locations in the region of exon 3 of the SOD1 nucleic acid sequence (top); SOD1 genomic nucleic acid sequence in the region of exon 3, the intron nucleic acid sequence 5′ of exon 3; and the target splice acceptor nucleic acid sequence 5′ of exon 3; and the nucleic acid sequence of the corresponding guide RNA (gRNA), with the splice acceptor (“AG”) nucleic acids immediately 5′ of SOD1 exon 3 indicated by upward arrows. Also noted in the figure are bystander adenosine (A) nucleobases (boxed) in the intronic sequence in proximity to the AG splice acceptor 5′ of SOD1 exon 3.

[0277] FIG. 56 is a table depicting efficiency of target site nucleobase alteration in the target nucleic acid sequence using the base editor systems and methods described herein and following PCR and deep sequencing of DNA. Shown is percentage efficiency of precise A-to-G nucleotide change (alteration) in the target splice acceptor (AG) nucleic acid sequence residing 5′ of exon 3 of the SOD1 genomic nucleic acid sequence, as detected by deep sequencing (MySeq) following PCR of the genomic DNA in cells in which base editing by had occurred. Each nucleobase, A, C, G, T, is listed vertically along the left edge of the table, and the position in the DNA along the target site nucleic acid (in base pairs (bp)) is shown along the bottom of the table. The table demonstrates about 81% (80.77%) efficiency of A-to-G conversion at the splice acceptor target nucleic acid site (position 6 along the target site) using the ABE8 base editor variants and the systems and methods described herein. The alteration of bystander A nucleobases to G nucleobases (at positions 2, 3, and 4 shown in the box to the left of the targeted A nucleobase of the splice acceptor) was minimal compared with editing of the target A in the splice acceptor nucleic acid sequence.

[0278] FIGS. 57A-57L are tables depicting efficiency of target site nucleobase alteration in the target nucleic acid sequence using the base editor systems and methods described herein and following PCR and deep sequencing of DNA. Each nucleobase, A, C, G, T, is listed vertically along the left edge of the table, and the position in the DNA along the target site nucleic acid (in base pairs (bp)) is shown along the bottom of the table. See, also, FIG. 56 supra.

[0279] FIG. 58 is a bar graph depicting the percentage of A-to-G base editing at the target position 6 at the splice acceptor target site (AG nucleic acid site) achieved by the adenosine base editors (ABE8 variants) with guide 20 assayed versus controls. The Protospacer PAM sequence for the ABE assessed was NGG ABE.

[0280] FIG. 59 is a bar graph depicting the percentage of A-to-G base editing at the target position 5 (left) and a bar graph depicting the total percent of A-to-G base editing at positions 2, 5, 9 (right) at the splice acceptor target site (AG nucleic acid site) achieved by the adenosine base editors (ABE8 variants) with guide 42 assayed versus controls. The Protospacer PAM sequence for the ABE assessed was NGG ABE.

[0281] FIG. 60A is a bar graph depicting the percentage of A-to-G base editing at the target position 5 at the splice acceptor target site (AG nucleic acid site) achieved by the adenosine base editors (PV variants) with guide 41 assayed versus controls. The Protospacer PAM sequence for the ABE assessed was NGT ABE. FIG. 60B is a table depicting efficiency of target site nucleobase alteration in the target nucleic acid sequence using the base editor systems and methods described herein and following PCR and deep sequencing of DNA. Each nucleobase, A, C, G, T, is listed vertically along the left edge of the table, and the position in the DNA along the target site nucleic acid (in base pairs (bp)) is shown along the bottom of the table. See, also, FIG. 56 supra.

[0282] FIG. 61 is a bar graph depicting the total percent of A-to-G base editing at the splice acceptor target site (AG nucleic acid site) achieved by the adenosine base editors (PV variants) with guide 24 assayed versus controls. The Protospacer PAM sequence for the ABE assessed was NGA ABE.

[0283] FIG. 62 shows the SOD1 protein level (left: western blot, right: quantification) in HEK297T cells edited with ABE8.8 or ABE7.10 with guide 20. Beta Actin was used as a control.

[0284] FIG. 63 is a bar graph depicting the percentage of C-to-T base editing at the target position 8 at the splice acceptor target site (AG nucleic acid site) achieved by the cytidine base editors (PV variants) with guide 19 assayed versus controls. The Protospacer PAM sequence for the ABE assessed was NGC CBE.

[0285] FIG. 64A is a bar graph (left) depicting the percentage of A-to-G base editing at the target position 5 at the splice acceptor target site (AG nucleic acid site) achieved by the adenosine base editors (PV variants) with guide 41 assayed versus controls. The Protospacer PAM sequence for the ABE assessed was NGT ABE. On the right is a diagramic illustration depicting the numeric genomic DNA locations in the region of exon 3 of the SOD1 nucleic acid sequence where guides 41, 20, 40, and 21 are designed to bind. See, also, FIG. 55 supra. FIG. 64B is a table depicting efficiency of target site nucleobase alteration in the target nucleic acid sequence using the base editor systems and methods described herein and following PCR and deep sequencing of DNA. Each nucleobase, A, C, G, T, is listed vertically along the left edge of the table, and the position in the DNA along the target site nucleic acid (in base pairs (bp)) is shown along the bottom of the table. See, also, FIG. 56 supra.

[0286] FIG. 65 is a bar graph (left) depicting the total percent of A-to-G base editing at the splice acceptor target site (AG nucleic acid site) achieved by the adenosine base editors (ABE variants) with guide 42 assayed versus controls. The Protospacer PAM sequence for the ABE assessed was NGG ABE. On the right is a diagramic illustration depicting the numeric genomic DNA locations in the region of exon 3 of the SOD1 nucleic acid sequence where guides 42, 24, and 25 are designed to bind. See, also, FIG. 55 supra.

[0287] FIG. 66A is a bar graph depicting the total percent of C-to-T base editing achieved by the cytidine base editor (BE4 VRQR) with guide 40 assayed versus a control. The Protospacer PAM sequence for the CBE assessed was NGA CBE. FIG. 66B is a table depicting efficiency of target site nucleobase alteration in the target nucleic acid sequence using the base editor systems and methods described herein and following PCR and deep sequencing of DNA. Each nucleobase, A, C, G, T, is listed vertically along the left edge of the table, and the position in the DNA along the target site nucleic acid (in base pairs (bp)) is shown along the bottom of the table. See, also, FIG. 56 supra.

[0288] FIG. 67 is a bar graph depicting the percentage of A-to-G base editing at the target position 5 at the splice acceptor target site (AG nucleic acid site) achieved by the adenosine base editors (PV variants) with guide 18 assayed versus controls. The Protospacer PAM sequence for the ABE assessed was NGT ABE.

[0289] FIG. 68 is a table depicting efficiency of target site nucleobase alteration in the target nucleic acid sequence using the base editor systems and methods described herein and following PCR and deep sequencing of DNA. Each nucleobase, A, C, G, T, is listed vertically along the left edge of the table, and the position in the DNA along the target site nucleic acid (in base pairs (bp)) is shown along the bottom of the table. See, also, FIG. 56 supra.

[0290] FIG. 69 is a bar graph depicting the total percent of C-to-T base editing achieved by the cytidine base editor (BE4 VRQR) with guide 16 assayed versus a control. The Protospacer PAM sequence for the CBE assessed was NGA CBE.

[0291] FIG. 70 is a bar graph depicting the percentage of C-to-T base editing at the target position 4 achieved by the cytidine base editor (BE4 VRQR) with guide 17 assayed versus a control. The Protospacer PAM sequence for the CBE assessed was NGA CBE.

[0292] FIG. 71 is a bar graph depicting the percentage of C-to-T base editing at the target position 5 achieved by the cytidine base editor (BE4 VRQR) with guide 21 assayed versus a control. The Protospacer PAM sequence for the CBE assessed was NGA CBE.

[0293] FIGS. 72A-72L are tables depicting efficiency of target site nucleobase alteration in the target nucleic acid sequence using the base editor systems and methods described herein and following PCR and deep sequencing of DNA. Each nucleobase, A, C, G, T, is listed vertically along the left edge of the table, and the position in the DNA along the target site nucleic acid (in base pairs (bp)) is shown along the bottom of the table. See, also, FIG. 56 supra.

[0294] FIGS. 73A-73C are tables depicting efficiency of target site nucleobase alteration in the target nucleic acid sequence using the base editor systems and methods described herein and following PCR and deep sequencing of DNA. Each nucleobase, A, C, G, T, is listed vertically along the left edge of the table, and the position in the DNA along the target site nucleic acid (in base pairs (bp)) is shown along the bottom of the table. See, also, FIG. 56 supra.

[0295] FIGS. 74A-74C are tables depicting efficiency of target site nucleobase alteration in the target nucleic acid sequence using the base editor systems and methods described herein and following PCR and deep sequencing of DNA. Each nucleobase, A, C, G, T, is listed vertically along the left edge of the table, and the position in the DNA along the target site nucleic acid (in base pairs (bp)) is shown along the bottom of the table. See, also, FIG. 56 supra.

[0296] FIGS. 75A-75D are tables depicting efficiency of target site nucleobase alteration in the target nucleic acid sequence using the base editor systems and methods described herein and following PCR and deep sequencing of DNA. Each nucleobase, A, C, G, T, is listed vertically along the left edge of the table, and the position in the DNA along the target site nucleic acid (in base pairs (bp)) is shown along the bottom of the table. See, also, FIG. 56 supra.

[0297] FIGS. 76A-76L are tables depicting efficiency of target site nucleobase alteration in the target nucleic acid sequence using the base editor systems and methods described herein and following PCR and deep sequencing of DNA. Each nucleobase, A, C, G, T, is listed vertically along the left edge of the table, and the position in the DNA along the target site nucleic acid (in base pairs (bp)) is shown along the bottom of the table. See, also, FIG. 56 supra.

[0298] FIGS. 77A-77L are tables depicting efficiency of target site nucleobase alteration in the target nucleic acid sequence using the base editor systems and methods described herein and following PCR and deep sequencing of DNA. Each nucleobase, A, C, G, T, is listed vertically along the left edge of the table, and the position in the DNA along the target site nucleic acid (in base pairs (bp)) is shown along the bottom of the table. See, also, FIG. 56 supra.

[0299] FIGS. 78A-78D are tables depicting efficiency of target site nucleobase alteration in the target nucleic acid sequence using the base editor systems and methods described herein and following PCR and deep sequencing of DNA. Each nucleobase, A, C, G, T, is listed vertically along the left edge of the table, and the position in the DNA along the target site nucleic acid (in base pairs (bp)) is shown along the bottom of the table. See, also, FIG. 56 supra.

[0300] FIGS. 79A-79L are tables depicting efficiency of target site nucleobase alteration in the target nucleic acid sequence using the base editor systems and methods described herein and following PCR and deep sequencing of DNA. Each nucleobase, A, C, G, T, is listed vertically along the left edge of the table, and the position in the DNA along the target site nucleic acid (in base pairs (bp)) is shown along the bottom of the table. See, also, FIG. 56 supra.

[0301] FIG. 80 shows that a stop codon was introduced in exon 1 of the Androgen Receptor when “CAG” was targeted using a cytidine base editor (CBE).

[0302] FIG. 81 provides two graphs. The graph on the left shows percent C to T editing by the specified cytidine base editor. The graph on the right shows percent indel rate for each of the cytidine base editors.

[0303] FIGS. 82A-82I are tables depicting the efficiency of percentage of C to T editing in the AR nucleic acid sequence using CBE base editor variants, as detected by deep sequencing (MySeq) following PCR of the genomic DNA in cells in which base editing had occurred. FIGS. 82A-82I depict the percent of C to T base editing at position 6 in the AR nucleic acid target site. Control reactions are shown where water was used in place of the CBE.

[0304] FIG. 83A provides two graphs. The graph on the left shows the introduction of a premature termination codon in exon 1 resulted in the functional knockout of the androgen receptor in the majority of cells. The graph in the middle shows percent indel rate for each of the cytidine base editors. On the right is a diagramic illustration depicting the numeric genomic DNA locations in the region of exon 1 of the AR nucleic acid sequence where guide 8 are designed to bind. See, also, FIG. 80 supra. FIG. 83B is a table depicting the efficiency of percentage of C to T editing in the AR nucleic acid sequence using CBE base editor variants, as detected by deep sequencing (MySeq) following PCR of the genomic DNA in cells in which base editing had occurred. FIG. 83B depicts the percent of C to T base editing at the target position in the AR nucleic acid target site. Control reactions are shown where water was used in place of the CBE.

[0305] FIG. 84A is a bar graph (left) depicting the percentage of C-to-T base editing at the target position 6 achieved by the cytidine base editors (BGX5, BGX27, BGX 29, and BTX448) with guide 10 assayed versus a control and the indel rates in percentage (middle). The Protospacer PAM sequence for the CBE assessed was NGG CBE. On the right is a diagramic illustration depicting the numeric genomic DNA locations in the region of exon 1 of the AR nucleic acid sequence where guides 9 and 10 are designed to bind. See, also, FIG. 80 supra. FIG. 84B is a table depicting the efficiency of percentage of C to T editing in the AR nucleic acid sequence using CBE base editor variants, as detected by deep sequencing (MySeq) following PCR of the genomic DNA in cells in which base editing had occurred. FIG. 83B depicts the percent of C to T base editing at position 6 in the AR nucleic acid target site. Control reactions are shown where water was used in place of the CBE.

[0306] FIG. 85 is a bar graph depicting the total percent of A-to-G base editing at the splice acceptor target site (AG nucleic acid site) achieved by the adenosine base editors (ABE8 variants) with guide 8 (left) or guide 14 (right) assayed versus controls. The Protospacer PAM sequence for the ABE assessed was NGG ABE.

[0307] FIG. 86A is a bar graph (top) and a summary table (bottom) depicting the percentage of C-to-T base editing at the target position 8 achieved by the cytidine base editor (BE4 VRQR) with guide 11 assayed versus a control. The Protospacer PAM sequence for the CBE assessed was NGA CBE. FIG. 86B is a table depicting the efficiency of percentage of C to T editing in the AR nucleic acid sequence using CBE base editor variants, as detected by deep sequencing (MySeq) following PCR of the genomic DNA in cells in which base editing had occurred. FIG. 86B depicts the percent of C to T base editing at position 8 in the AR nucleic acid target site. Control reactions are shown where water was used in place of the CBE.

[0308] FIG. 87A is a bar graph (top) and a summary table (bottom) depicting the percentage of C-to-T base editing at the target position 5 achieved by the cytidine base editor (BE4 VRQR) with guide 12 assayed versus a control. The Protospacer PAM sequence for the CBE assessed was NGA CBE. FIG. 87B is a table depicting the efficiency of percentage of C to T editing in the AR nucleic acid sequence using CBE base editor variants, as detected by deep sequencing (MySeq) following PCR of the genomic DNA in cells in which base editing had occurred. FIG. 87B depicts the percent of C to T base editing at position 5 in the AR nucleic acid target site. Control reactions are shown where water was used in place of the CBE.

[0309] FIG. 88 is a bar graph depicting the total percent of C-to-T base editing achieved by the cytidine base editor (BE4 VRQR) with guide 15 assayed versus a control. The Protospacer PAM sequence for the CBE assessed was NGA CBE.

[0310] Each nucleobase, A, C, G, T, is listed vertically along the left edge of the table, and the position in the DNA along the target site nucleic acid (in base pairs (bp)) is shown along the bottom of the table.

[0311] FIGS. 89A-89D are tables depicting efficiency of target site nucleobase alteration in the target nucleic acid sequence using the base editor systems and methods described herein and following PCR and deep sequencing of DNA. Shown is percentage efficiency of precise C-to-T or A-to-G nucleotide change (alteration) in the target nucleic acid sequence of exon 1 of the AR genomic nucleic acid sequence, as detected by deep sequencing (MySeq) following PCR of the genomic DNA in cells in which base editing by had occurred. Each nucleobase, A, C, G, T, is listed vertically along the left edge of the table, and the position in the DNA along the target site nucleic acid (in base pairs (bp)) is shown along the bottom of the table.

[0312] FIGS. 90A-90C are tables depicting efficiency of target site nucleobase alteration in the target nucleic acid sequence using the base editor systems and methods described herein and following PCR and deep sequencing of DNA. Shown is percentage efficiency of precise C-to-T or A-to-G nucleotide change (alteration) in the target nucleic acid sequence of exon 1 of the AR genomic nucleic acid sequence, as detected by deep sequencing (MySeq) following PCR of the genomic DNA in cells in which base editing by had occurred. Each nucleobase, A, C, G, T, is listed vertically along the left edge of the table, and the position in the DNA along the target site nucleic acid (in base pairs (bp)) is shown along the bottom of the table.

[0313] FIGS. 91A-91C are tables depicting efficiency of target site nucleobase alteration in the target nucleic acid sequence using the base editor systems and methods described herein and following PCR and deep sequencing of DNA. Shown is percentage efficiency of precise C-to-T or A-to-G nucleotide change (alteration) in the target nucleic acid sequence of exon 1 of the AR genomic nucleic acid sequence, as detected by deep sequencing (MySeq) following PCR of the genomic DNA in cells in which base editing by had occurred. Each nucleobase, A, C, G, T, is listed vertically along the left edge of the table, and the position in the DNA along the target site nucleic acid (in base pairs (bp)) is shown along the bottom of the table.

[0314] FIGS. 92A and 92B are tables depicting efficiency of target site nucleobase alteration in the target nucleic acid sequence using the base editor systems and methods described herein and following PCR and deep sequencing of DNA. Shown is percentage efficiency of precise C-to-T or A-to-G nucleotide change (alteration) in the target nucleic acid sequence of exon 1 of the AR genomic nucleic acid sequence, as detected by deep sequencing (MySeq) following PCR of the genomic DNA in cells in which base editing by had occurred. Each nucleobase, A, C, G, T, is listed vertically along the left edge of the table, and the position in the DNA along the target site nucleic acid (in base pairs (bp)) is shown along the bottom of the table.

[0315] FIGS. 93A-93X are tables depicting efficiency of target site nucleobase alteration in the target nucleic acid sequence using the base editor systems and methods described herein and following PCR and deep sequencing of DNA. Shown is percentage efficiency of precise C-to-T or A-to-G nucleotide change (alteration) in the target nucleic acid sequence of exon 1 of the AR genomic nucleic acid sequence, as detected by deep sequencing (MySeq) following PCR of the genomic DNA in cells in which base editing by had occurred. Each nucleobase, A, C, G, T, is listed vertically along the left edge of the table, and the position in the DNA along the target site nucleic acid (in base pairs (bp)) is shown along the bottom of the table.

### DETAILED DESCRIPTION OF THE INVENTION

[0316] The invention provides compositions comprising novel adenine base editors (e.g., ABE8) that have increased efficiency and methods of using them to generate modifications in target nucleobase sequences.

### Nucleobase Editor

[0317] Disclosed herein is a base editor or a nucleobase editor for editing, modifying or altering a target nucleotide sequence of a polynucleotide. In particular embodiments, a base editor of the invention modifies an SOD1 polynucleotide. In particular embodiments, a base editor of the invention introduces a stop codon or disrupts a splice site in an AR polynucleotide. Described herein is a nucleobase editor or a base editor comprising a polynucleotide programmable nucleotide binding domain (e.g., Cas9) and a nucleobase editing domain (e.g., adenosine deaminase). A polynucleotide programmable nucleotide binding domain (e.g., Cas9), when in conjunction with a bound guide polynucleotide (e.g., gRNA), can specifically bind to a target polynucleotide sequence (i.e., via complementary base pairing between bases of the bound guide nucleic acid and bases of the target polynucleotide sequence) and thereby localize the base editor to the target nucleic acid sequence desired to be edited. In some embodiments, the target polynucleotide sequence comprises single-stranded DNA or double-stranded DNA. In some embodiments, the target polynucleotide sequence comprises RNA. In some embodiments, the target polynucleotide sequence comprises a DNA-RNA hybrid.

### Polynucleotide Programmable Nucleotide Binding Domain

[0318] It should be appreciated that polynucleotide programmable nucleotide binding domains can also include nucleic acid programmable proteins that bind RNA. For example, the polynucleotide programmable nucleotide binding domain can be associated with a nucleic acid that guides the polynucleotide programmable nucleotide binding domain to an RNA. Other nucleic acid programmable DNA binding proteins are also within the scope of this disclosure, though they are not specifically listed in this disclosure.

[0319] A polynucleotide programmable nucleotide binding domain of a base editor can itself comprise one or more domains. For example, a polynucleotide programmable nucleotide binding domain can comprise one or more nuclease domains. In some embodiments, the nuclease domain of a polynucleotide programmable nucleotide binding domain can comprise an endonuclease or an exonuclease. Herein the term “exonuclease” refers to a protein or polypeptide capable of digesting a nucleic acid (e.g., RNA or DNA) from free ends, and the term “endonuclease” refers to a protein or polypeptide capable of catalyzing (e.g., cleaving) internal regions in a nucleic acid (e.g., DNA or RNA). In some embodiments, an endonuclease can cleave a single strand of a double-stranded nucleic acid. In some embodiments, an endonuclease can cleave both strands of a double-stranded nucleic acid molecule. In some embodiments a polynucleotide programmable nucleotide binding domain can be a deoxyribonuclease. In some embodiments a polynucleotide programmable nucleotide binding domain can be a ribonuclease.

[0320] In some embodiments, a nuclease domain of a polynucleotide programmable nucleotide binding domain can cut zero, one, or two strands of a target polynucleotide. In some embodiments, the polynucleotide programmable nucleotide binding domain can comprise a nickase domain. Herein the term “nickase” refers to a polynucleotide programmable nucleotide binding domain comprising a nuclease domain that is capable of cleaving only one strand of the two strands in a duplexed nucleic acid molecule (e.g., DNA). In some embodiments, a nickase can be derived from a fully catalytically active (e.g., natural) form of a polynucleotide programmable nucleotide binding domain by introducing one or more mutations into the active polynucleotide programmable nucleotide binding domain. For example, where a polynucleotide programmable nucleotide binding domain comprises a nickase domain derived from Cas9, the Cas9-derived nickase domain can include a D10A mutation and a histidine at position 840. In such embodiments, the residue H840 retains catalytic activity and can thereby cleave a single strand of the nucleic acid duplex. In another example, a Cas9-derived nickase domain can comprise an H840A mutation, while the amino acid residue at position 10 remains a D. In some embodiments, a nickase can be derived from a fully catalytically active (e.g., natural) form of a polynucleotide programmable nucleotide binding domain by removing all or a portion of a nuclease domain that is not required for the nickase activity. For example, where a polynucleotide programmable nucleotide binding domain comprises a nickase domain derived from Cas9, the Cas9-derived nickase domain can comprise a deletion of all or a portion of the RuvC domain or the HNH domain.

[0321] The amino acid sequence of an exemplary catalytically active Cas9 is as follows:

MDKKYSIGLDIGTNSVGWAVITDEYKVPSKKFKVLG
NTDRHSIKKNLIGALLFDSGETAEATRLKRTARRR
YTRRKNRICYLQEIFSNEMAKVDDSFFHRLEESFL
VEEDKKHERHPIFGNIVDEVAYHEKYPTIYHLRKK
LVDSTDKADLRLIYLALAHMIKFRGHFLIEGDLNP
DNSDVDKLFIQLVQTYNQLFEENPINASGVDAKAI
LSARLSKSRRLENLIAQLPGEKKNGLFGNLIALSL
GLTPNFKSNFDLAEDAKLQLSKDTYDDDLDNLLAQ
IGDQYADLFLAAKNLSDAILLSDILRVNTEITKAP
LSASMIKRYDEHHQDLTLLKALVRQQLPEKYKEIF
FDQSKNGYAGYIDGGASQEEFYKFIKPILEKMDGT
EELLVKLNREDLLRKQRTFDNGSIPHQIHLGELHA
ILRRQEDFYPFLKDNREKIEKILTFRIPYYVGPLA
RGNSRFAWMTRKSEETITPWNFEEVVDKGASAQSF
IERMTNFDKNLPNEKVLPKHSLLYEYFTVYNELTK
VKYVTEGMRKPAFLSGEQKKAIVDLLFKTNRKVTV
KQLKEDYFKKIECFDSVEISGVEDRFNASLGTYHD
LLKIIKDKDFLDNEENEDILEDIVLTLTLFEDREM
IEERLKTYAHLFDDKVMKQLKRRRYTGWGRLSRKL
INGIRDKQSGKTILDFLKSDGFANRNFMQLIHDDS
LTFKEDIQKAQVSGQGDSLHEHIANLAGSPAIKKG
ILQTVKVVDELVKVMGRHKPENIVIEMARENQTTQ
KGQKNSRERMKRIEEGIKELGSQILKEHPVENTQL
QNEKLYLYYLQNGRDMYVDQELDINRLSDYDVDHI
VPQSFLKDDSIDNKVLTRSDKNRGKSDNVPSEEVV
KKMKNYWRQLLNAKLITQRKFDNLTKAERGGLSEL
DKAGFIKRQLVETRQITKHVAQILDSRMNTKYDEN
DKLIREVKVITLKSKLVSDFRKDFQFYKVREINNY
HHAHDAYLNAVVGTALIKKYPKLESEFVYGDYKVY
DVRKMIAKSEQEIGKATAKYFFYSNIMNFFKTEIT
LANGEIRKRPLIETNGETGEIVWDKGRDFATVRKV
LSMPQVNIVKKTEVQTGGFSKESILPKRNSDKLIA
RKKDWDPKKYGGFDSPTVAYSVLVVAKVEKGKSKK
LKSVKELLGITIMERSSFEKNPIDFLEAKGYKEVK
KDLIIKLPKYSLFELENGRKRMLASAGELQKGNEL
ALPSKYVNFLYLASHYEKLKGSPEDNEQKQLFVEQ
HKHYLDEIIEQISEFSKRVILADANLDKVLSAYNK
HRDKPIREQAENIIHLFTLTNLGAPAAFKYFDTTI
DRKRYTSTKEVLDATLIHQSITGLYETRIDLSQLG
GD.

[0322] A base editor comprising a polynucleotide programmable nucleotide binding domain comprising a nickase domain is thus able to generate a single-strand DNA break (nick) at a specific polynucleotide target sequence (e.g., determined by the complementary sequence of a bound guide nucleic acid). In some embodiments, the strand of a nucleic acid duplex target polynucleotide sequence that is cleaved by a base editor comprising a nickase domain (e.g., Cas9-derived nickase domain) is the strand that is not edited by the base editor (i.e., the strand that is cleaved by the base editor is opposite to a strand comprising a base to be edited). In other embodiments, a base editor comprising a nickase domain (e.g., Cas9-derived nickase domain) can cleave the strand of a DNA molecule which is being targeted for editing. In such embodiments, the non-targeted strand is not cleaved.

[0323] Also provided herein are base editors comprising a polynucleotide programmable nucleotide binding domain which is catalytically dead (i.e., incapable of cleaving a target polynucleotide sequence). Herein the terms “catalytically dead” and “nuclease dead” are used interchangeably to refer to a polynucleotide programmable nucleotide binding domain which has one or more mutations and/or deletions resulting in its inability to cleave a strand of a nucleic acid. In some embodiments, a catalytically dead polynucleotide programmable nucleotide binding domain base editor can lack nuclease activity as a result of specific point mutations in one or more nuclease domains. For example, in the case of a base editor comprising a Cas9 domain, the Cas9 can comprise both a D10A mutation and an H840A mutation. Such mutations inactivate both nuclease domains, thereby resulting in the loss of nuclease activity. In other embodiments, a catalytically dead polynucleotide programmable nucleotide binding domain can comprise one or more deletions of all or a portion of a catalytic domain (e.g., RuvC1 and/or HNH domains). In further embodiments, a catalytically dead polynucleotide programmable nucleotide binding domain comprises a point mutation (e.g., D10A or H840A) as well as a deletion of all or a portion of a nuclease domain.

[0324] Also contemplated herein are mutations capable of generating a catalytically dead polynucleotide programmable nucleotide binding domain from a previously functional version of the polynucleotide programmable nucleotide binding domain. For example, in the case of catalytically dead Cas9 (“dCas9”), variants having mutations other than D10A and H840A are provided, which result in nuclease inactivated Cas9. Such mutations, by way of example, include other amino acid substitutions at D10 and H840, or other substitutions within the nuclease domains of Cas9 (e.g., substitutions in the HNH nuclease subdomain and/or the RuvC1 subdomain). Additional suitable nuclease-inactive dCas9 domains can be apparent to those of skill in the art based on this disclosure and knowledge in the field, and are within the scope of this disclosure. Such additional exemplary suitable nuclease-inactive Cas9 domains include, but are not limited to, D10A/H840A, D10A/D839A/H840A, and D10A/D839A/H840A/N863A mutant domains (See, e.g., Prashant et al., CAS9 transcriptional activators for target specificity screening and paired nickases for cooperative genome engineering. Nature Biotechnology. 2013; 31(9): 833-838, the entire contents of which are incorporated herein by reference).

[0325] Non-limiting examples of a polynucleotide programmable nucleotide binding domain which can be incorporated into a base editor include a CRISPR protein-derived domain, a restriction nuclease, a meganuclease, TAL nuclease (TALEN), and a zinc finger nuclease (ZFN). In some embodiments, a base editor comprises a polynucleotide programmable nucleotide binding domain comprising a natural or modified protein or portion thereof which via a bound guide nucleic acid is capable of binding to a nucleic acid sequence during CRISPR (i.e., Clustered Regularly Interspaced Short Palindromic Repeats)-mediated modification of a nucleic acid. Such a protein is referred to herein as a “CRISPR protein.” Accordingly, disclosed herein is a base editor comprising a polynucleotide programmable nucleotide binding domain comprising all or a portion of a CRISPR protein (i.e. a base editor comprising as a domain all or a portion of a CRISPR protein, also referred to as a “CRISPR protein-derived domain” of the base editor). A CRISPR protein-derived domain incorporated into a base editor can be modified compared to a wild-type or natural version of the CRISPR protein. For example, as described below a CRISPR protein-derived domain can comprise one or more mutations, insertions, deletions, rearrangements and/or recombinations relative to a wild-type or natural version of the CRISPR protein.

[0326] CRISPR is an adaptive immune system that provides protection against mobile genetic elements (viruses, transposable elements and conjugative plasmids). CRISPR clusters contain spacers, sequences complementary to antecedent mobile elements, and target invading nucleic acids. CRISPR clusters are transcribed and processed into CRISPR RNA (crRNA). In type II CRISPR systems, correct processing of pre-crRNA requires a trans-encoded small RNA (tracrRNA), endogenous ribonuclease 3 (mc) and a Cas9 protein. The tracrRNA serves as a guide for ribonuclease 3-aided processing of pre-crRNA. Subsequently, Cas9/crRNA/tracrRNA endonucleolytically cleaves linear or circular dsDNA target complementary to the spacer. The target strand not complementary to crRNA is first cut endonucleolytically, and then trimmed 3′-5′ exonucleolytically. In nature, DNA-binding and cleavage typically requires protein and both RNAs. However, single guide RNAs (“sgRNA,” or simply “gNRA”) can be engineered so as to incorporate aspects of both the crRNA and tracrRNA into a single RNA species. See, e.g., Jinek M., et al., Science 337:816-821(2012), the entire contents of which is hereby incorporated by reference. Cas9 recognizes a short motif in the CRISPR repeat sequences (the PAM or protospacer adjacent motif) to help distinguish self versus non-self.

[0327] In some embodiments, the methods described herein can utilize an engineered Cas protein. A guide RNA (gRNA) is a short synthetic RNA composed of a scaffold sequence necessary for Cas-binding and a user-defined ˜20 nucleotide spacer that defines the genomic target to be modified. Thus, a skilled artisan can change the genomic target of the Cas protein specificity is partially determined by how specific the gRNA targeting sequence is for the genomic target compared to the rest of the genome.

[0328] In some embodiments, the gRNA scaffold sequence is as follows: GUUUUAGAGC UAGAAAUAGC AAGUUAAAAU AAGGCUAGUC CGUUAUCAAC UUGAAAAAGU GGCACCGAGU CGGUGCUUUU.

[0329] In some embodiments, a CRISPR protein-derived domain incorporated into a base editor is an endonuclease (e.g., deoxyribonuclease or ribonuclease) capable of binding a target polynucleotide when in conjunction with a bound guide nucleic acid. In some embodiments, a CRISPR protein-derived domain incorporated into a base editor is a nickase capable of binding a target polynucleotide when in conjunction with a bound guide nucleic acid. In some embodiments, a CRISPR protein-derived domain incorporated into a base editor is a catalytically dead domain capable of binding a target polynucleotide when in conjunction with a bound guide nucleic acid. In some embodiments, a target polynucleotide bound by a CRISPR protein derived domain of a base editor is DNA. In some embodiments, a target polynucleotide bound by a CRISPR protein-derived domain of a base editor is RNA.

[0330] Cas proteins that can be used herein include class 1 and class 2. Non-limiting examples of Cas proteins include Cas1, Cas1B, Cas2, Cas3, Cas4, Cas5, Cas5d, Cas5t, Cas5h, Cas5a, Cas6, Cas7, Cas8, Cas9 (also known as Csn1 or Csx12), Cas10, Csy1, Csy2, Csy3, Csy4, Cse1, Cse2, Cse3, Cse4, Cse5e, Csc1, Csc2, Csa5, Csn1, Csn2, Csm1, Csm2, Csm3, Csm4, Csm5, Csm6, Cmr1, Cmr3, Cmr4, Cmr5, Cmr6, Csb1, Csb2, Csb3, Csx17, Csx14, Csx10, Csx16, CsaX, Csx3, Csx1, Csx1S, Csf1, Csf2, CsO, Csf4, Csd1, Csd2, Cst1, Cst2, Csh1, Csh2, Csa1, Csa2, Csa3, Csa4, Csa5, Cas12a/Cpf1, Cas12b/C2c1, Cas12c/C2c3, Cas12d/CasY, Cas12e/CasX, Cas12g, Cas12h, and Cas12i, CARF, DinG, homologues thereof, or modified versions thereof. An unmodified CRISPR enzyme can have DNA cleavage activity, such as Cas9, which has two functional endonuclease domains: RuvC and HNH. A CRISPR enzyme can direct cleavage of one or both strands at a target sequence, such as within a target sequence and/or within a complement of a target sequence. For example, a CRISPR enzyme can direct cleavage of one or both strands within about 1, 2, 3, 4, 5, 6, 7, 8, 9, 10, 15, 20, 25, 50, 100, 200, 500, or more base pairs from the first or last nucleotide of a target sequence.

[0331] A vector that encodes a CRISPR enzyme that is mutated to with respect, to a corresponding wild-type enzyme such that the mutated CRISPR enzyme lacks the ability to cleave one or both strands of a target polynucleotide containing a target sequence can be used. Cas9 can refer to a polypeptide with at least or at least about 50%, 60%, 70%, 80%, 90%, 91%, 92%, 93%, 94%, 95%, 96%, 97%, 98%, 99%, or 100% sequence identity and/or sequence homology to a wild-type exemplary Cas9 polypeptide (e.g., Cas9 from S. pyogenes). Cas9 can refer to a polypeptide with at most or at most about 50%, 60%, 70%, 80%, 90%, 91%, 92%, 93%, 94%, 95%, 96%, 97%, 98%, 99%, or 100% sequence identity and/or sequence homology to a wild-type exemplary Cas9 polypeptide (e.g., from S. pyogenes). Cas9 can refer to the wild-type or a modified form of the Cas9 protein that can comprise an amino acid change such as a deletion, insertion, substitution, variant, mutation, fusion, chimera, or any combination thereof.

[0332] In some embodiments, a CRISPR protein-derived domain of a base editor can include all or a portion of Cas9 from Corynebacterium ulcerans (NCBI Refs: NC_015683.1, NC_017317.1); Corynebacterium diphtheria (NCBI Refs: NC_016782.1, NC_016786.1); Spiroplasma syrphidicola (NCBI Ref: NC_021284.1); Prevotella intermedia (NCBI Ref: NC_017861.1); Spiroplasma taiwanense (NCBI Ref: NC_021846.1); Streptococcus iniae (NCBI Ref: NC_021314.1); Belliella baltica (NCBI Ref: NC_018010.1); Psychroflexus torquis (NCBI Ref: NC_018721.1); Streptococcus thermophilus (NCBI Ref: YP_820832.1); Listeria innocua (NCBI Ref: NP_472073.1); Campylobacterjejuni (NCBI Ref: YP_002344900.1); Neisseria meningitidis (NCBI Ref: YP_002342100.1), Streptococcus pyogenes, or Staphylococcus aureus.

Cas9 domains of Nucleobase Editors

[0333] Cas9 nuclease sequences and structures are well known to those of skill in the art (See, e.g., “Complete genome sequence of an Ml strain of Streptococcus pyogenes.” Ferretti et al., Proc. Natl. Acad. Sci. U.S.A. 98:4658-4663(2001); “CRISPR RNA maturation by trans-encoded small RNA and host factor RNase III.” Deltcheva E., et al., Nature 471:602-607(2011); and “A programmable dual-RNA-guided DNA endonuclease in adaptive bacterial immunity.” Jinek M., et al., Science 337:816-821(2012), the entire contents of each of which are incorporated herein by reference). Cas9 orthologs have been described in various species, including, but not limited to, S. pyogenes and S. thermophilus. Additional suitable Cas9 nucleases and sequences will be apparent to those of skill in the art based on this disclosure, and such Cas9 nucleases and sequences include Cas9 sequences from the organisms and loci disclosed in Chylinski, Rhun, and Charpentier, “The tracrRNA and Cas9 families of type II CRISPR-Cas immunity systems” (2013) RNA Biology 10:5, 726-737; the entire contents of which are incorporated herein by reference.

[0334] In some embodiments, a nucleic acid programmable DNA binding protein (napDNAbp) is a Cas9 domain. Non-limiting, exemplary Cas9 domains are provided herein. The Cas9 domain may be a nuclease active Cas9 domain, a nuclease inactive Cas9 domain (dCas9), or a Cas9 nickase (nCas9). In some embodiments, the Cas9 domain is a nuclease active domain. For example, the Cas9 domain may be a Cas9 domain that cuts both strands of a duplexed nucleic acid (e.g., both strands of a duplexed DNA molecule). In some embodiments, the Cas9 domain comprises any one of the amino acid sequences as set forth herein. In some embodiments the Cas9 domain comprises an amino acid sequence that is at least 60%, at least 65%, at least 70%, at least 75%, at least 80%, at least 85%, at least 90%, at least 95%, at least 96%, at least 97%, at least 98%, at least 99%, or at least 99.5% identical to any one of the amino acid sequences set forth herein. In some embodiments, the Cas9 domain comprises an amino acid sequence that has 1, 2, 3, 4, 5, 6, 7, 8, 9, 10, 11, 12, 13, 14, 15, 16, 17, 18, 19, 20, 21, 22, 21, 24, 25, 26, 27, 28, 29, 30, 31, 32, 33, 34, 35, 36, 37, 38, 39, 40, 41, 42, 43, 44, 45, 46, 47, 48, 49, 50 or more or more mutations compared to any one of the amino acid sequences set forth herein. In some embodiments, the Cas9 domain comprises an amino acid sequence that has at least 10, at least 15, at least 20, at least 30, at least 40, at least 50, at least 60, at least 70, at least 80, at least 90, at least 100, at least 150, at least 200, at least 250, at least 300, at least 350, at least 400, at least 500, at least 600, at least 700, at least 800, at least 900, at least 1000, at least 1100, or at least 1200 identical contiguous amino acid residues as compared to any one of the amino acid sequences set forth herein.

[0335] In some embodiments, proteins comprising fragments of Cas9 are provided. For example, in some embodiments, a protein comprises one of two Cas9 domains: (1) the gRNA binding domain of Cas9; or (2) the DNA cleavage domain of Cas9. In some embodiments, proteins comprising Cas9 or fragments thereof are referred to as “Cas9 variants.” A Cas9 variant shares homology to Cas9, or a fragment thereof. For example, a Cas9 variant is at least about 70% identical, at least about 80% identical, at least about 90% identical, at least about 95% identical, at least about 96% identical, at least about 97% identical, at least about 98% identical, at least about 99% identical, at least about 99.5% identical, or at least about 99.9% identical to wild-type Cas9. In some embodiments, the Cas9 variant may have 1, 2, 3, 4, 5, 6, 7, 8, 9, 10, 11, 12, 13, 14, 15, 16, 17, 18, 19, 20, 21, 22, 21, 24, 25, 26, 27, 28, 29, 30, 31, 32, 33, 34, 35, 36, 37, 38, 39, 40, 41, 42, 43, 44, 45, 46, 47, 48, 49, 50 or more amino acid changes compared to wild-type Cas9. In some embodiments, the Cas9 variant comprises a fragment of Cas9 (e.g., a gRNA binding domain or a DNA-cleavage domain), such that the fragment is at least about 70% identical, at least about 80% identical, at least about 90% identical, at least about 95% identical, at least about 96% identical, at least about 97% identical, at least about 98% identical, at least about 99% identical, at least about 99.5% identical, or at least about 99.9% identical to the corresponding fragment of wild-type Cas9. In some embodiments, the fragment is at least 30%, at least 35%, at least 40%, at least 45%, at least 50%, at least 55%, at least 60%, at least 65%, at least 70%, at least 75%, at least 80%, at least 85%, at least 90%, at least 95% identical, at least 96%, at least 97%, at least 98%, at least 99%, or at least 99.5% of the amino acid length of a corresponding wild-type Cas9. In some embodiments, the fragment is at least 100 amino acids in length. In some embodiments, the fragment is at least 100, 150, 200, 250, 300, 350, 400, 450, 500, 550, 600, 650, 700, 750, 800, 850, 900, 950, 1000, 1050, 1100, 1150, 1200, 1250, or at least 1300 amino acids in length.

[0336] In some embodiments, Cas9 fusion proteins as provided herein comprise the full-length amino acid sequence of a Cas9 protein, e.g., one of the Cas9 sequences provided herein. In other embodiments, however, fusion proteins as provided herein do not comprise a full-length Cas9 sequence, but only one or more fragments thereof. Exemplary amino acid sequences of suitable Cas9 domains and Cas9 fragments are provided herein, and additional suitable sequences of Cas9 domains and fragments will be apparent to those of skill in the art.

[0337] A Cas9 protein can associate with a guide RNA that guides the Cas9 protein to a specific DNA sequence that has complementary to the guide RNA. In some embodiments, the polynucleotide programmable nucleotide binding domain is a Cas9 domain, for example a nuclease active Cas9, a Cas9 nickase (nCas9), or a nuclease inactive Cas9 (dCas9). Examples of nucleic acid programmable DNA binding proteins include, without limitation, Cas9 (e.g., dCas9 and nCas9), CasY, CasY, Cpf1, Cas12b/C2C1, and Cas12c/C2C3. In some embodiments, wild-type Cas9 corresponds to Cas9 from Streptococcus pyogenes (NCBI Reference Sequence: NC_017053.1, nucleotide and amino acid sequences as follows).

ATGGATAAGAAATACTCAATAGGCTTAGATA
TCGGCACAAATAGCGTCGGATGGGCGGTGAT
CACTGATGATTATAAGGTTCCGTCTAAAAAG
TTCAAGGTTCTGGGAAATACAGACCGCCACA
GTATCAAAAAAAATCTTATAGGGGCTCTTTT
ATTTGGCAGTGGAGAGACAGCGGAAGCGACT
CGTCTCAAACGGACAGCTCGTAGAAGGTATA
CACGTCGGAAGAATCGTATTTGTTATCTACA
GGAGATTTTTTCAAATGAGATGGCGAAAGTA
GATGATAGTTTCTTTCATCGACTTGAAGAGT
CTTTTTTGGTGGAAGAAGACAAGAAGCATGA
ACGTCATCCTATTTTTGGAAATATAGTAGAT
GAAGTTGCTTATCATGAGAAATATCCAACTA
TCTATCATCTGCGAAAAAAATTGGCAGATTC
TACTGATAAAGCGGATTTGCGCTTAATCTAT
TTGGCCTTAGCGCATATGATTAAGTTTCGTG
GTCATTTTTTGATTGAGGGAGATTTAAATCC
TGATAATAGTGATGTGGACAAACTATTTATC
CAGTTGGTACAAATCTACAATCAATTATTTG
AAGAAAACCCTATTAACGCAAGTAGAGTAGA
TGCTAAAGCGATTCTTTCTGCACGATTGAGT
AAATCAAGACGATTAGAAAATCTCATTGCTC
AGCTCCCCGGTGAGAAGAGAAATGGCTTGTT
TGGGAATCTCATTGCTTTGTCATTGGGATTG
ACCCCTAATTTTAAATCAAATTTTGATTTGG
CAGAAGATGCTAAATTACAGCTTTCAAAAGA
TACTTACGATGATGATTTAGATAATTTATTG
GCGCAAATTGGAGATCAATATGCTGATTTGT
TTTTGGCAGCTAAGAATTTATCAGATGCTAT
TTTACTTTCAGATATCCTAAGAGTAAATAGT
GAAATAACTAAGGCTCCCCTATCAGCTTCAA
TGATTAAGCGCTACGATGAACATCATCAAGA
CTTGACTCTTTTAAAAGCTTTAGTTCGACAA
CAACTTCCAGAAAAGTATAAAGAAATCTTTT
TTGATCAATCAAAAAACGGATATGCAGGTTA
TATTGATGGGGGAGCTAGCCAAGAAGAATTT
TATAAATTTATCAAACCAATTTTAGAAAAAA
TGGATGGTACTGAGGAATTATTGGTGAAACT
AAATCGTGAAGATTTGCTGCGCAAGCAACGG
ACCTTTGACAACGGCTCTATTCCCCATCAAA
TTCACTTGGGTGAGCTGCATGCTATTTTGAG
AAGACAAGAAGACTTTTATCCATTTTTAAAA
GACAATCGTGAGAAGATTGAAAAAATCTTGA
CTTTTCGAATTCCTTATTATGTTGGTCCATT
GGCGCGTGGCAATAGTCGTTTTGCATGGATG
ACTCGGAAGTCTGAAGAAACAATTACCCCAT
GGAATTTTGAAGAAGTTGTCGATAAAGGTGC
TTCAGCTCAATCATTTATTGAACGCATGACA
AACTTTGATAAAAATCTTCCAAATGAAAAAG
TACTACCAAAACATAGTTTGCTTTATGAGTA
TTTTACGGTTTATAACGAATTGACAAAGGTC
AAATATGTTACTGAGGGAATGCGAAAACCAG
CATTTCTTTCAGGTGAACAGAAGAAAGCCAT
TGTTGATTTACTCTTCAAAACAAATCGAAAA
GTAACCGTTAAGCAATTAAAAGAAGATTATT
TCAAAAAAATAGAATGTTTTGATAGTGTTGA
AATTTCAGGAGTTGAAGATAGATTTAATGCT
TCATTAGGCGCCTACCATGATTTGCTAAAAA
TTATTAAAGATAAAGATTTTTTGGATAATGA
AGAAAATGAAGATATCTTAGAGGATATTGTT
TTAACATTGACCTTATTTGAAGATAGGGGGA
TGATTGAGGAAAGACTTAAAACATATGCTCA
CCTCTTTGATGATAAGGTGATGAAACAGCTT
AAACGTCGCCGTTATACTGGTTGGGGACGTT
TGTCTCGAAAATTGATTAATGGTATTAGGGA
TAAGCAATCTGGCAAAACAATATTAGATTTT
TTGAAATCAGATGGTTTTGCCAATCGCAATT
TTATGCAGCTGATCCATGATGATAGTTTGAC
ATTTAAAGAAGATATTCAAAAAGCACAGGTG
TCTGGACAAGGCCATAGTTTACATGAACAGA
TTGCTAACTTAGCTGGCAGTCCTGCTATTAA
AAAAGGTATTTTACAGACTGTAAAAATTGTT
GATGAACTGGTCAAAGTAATGGGGCATAAGC
CAGAAAATATCGTTATTGAAATGGCACGTGA
AAATCAGACAACTCAAAAGGGCCAGAAAAAT
TCGCGAGAGCGTATGAAACGAATCGAAGAAG
GTATCAAAGAATTAGGAAGTCAGATTCTTAA
AGAGCATCCTGTTGAAAATACTCAATTGCAA
AATGAAAAGCTCTATCTCTATTATCTACAAA
ATGGAAGAGACATGTATGTGGACCAAGAATT
AGATATTAATCGTTTAAGTGATTATGATGTC
GATCACATTGTTCCACAAAGTTTCATTAAAG
ACGATTCAATAGACAATAAGGTACTAACGCG
TTCTGATAAAAATCGTGGTAAATCGGATAAC
GTTCCAAGTGAAGAAGTAGTCAAAAAGATGA
AAAACTATTGGAGACAACTTCTAAACGCCAA
GTTAATCACTCAACGTAAGTTTGATAATTTA
ACGAAAGCTGAACGTGGAGGTTTGAGTGAAC
TTGATAAAGCTGGTTTTATCAAACGCCAATT
GGTTGAAACTCGCCAAATCACTAAGCATGTG
GCACAAATTTTGGATAGTCGCATGAATACTA
AATACGATGAAAATGATAAACTTATTCGAGA
GGTTAAAGTGATTACCTTAAAATCTAAATTA
GTTTCTGACTTCCGAAAAGATTTCCAATTCT
ATAAAGTACGTGAGATTAACAATTACCATCA
TGCCCATGATGCGTATCTAAATGCCGTCGTT
GGAACTGCTTTGATTAAGAAATATCCAAAAC
TTGAATCGGAGTTTGTCTATGGTGATTATAA
AGTTTATGATGTTCGTAAAATGATTGCTAAG
TCTGAGCAAGAAATAGGCAAAGCAACCGCAA
AATATTTCTTTTACTCTAATATCATGAACTT
CTTCAAAACAGAAATTACACTTGCAAATGGA
GAGATTCGCAAACGCCCTCTAATCGAAACTA
ATGGGGAAACTGGAGAAATTGTCTGGGATAA
AGGGCGAGATTTTGCCACAGTGCGCAAAGTA
TTGTCCATGCCCCAAGTCAATATTGTCAAGA
AAACAGAAGTACAGACAGGCGGATTCTCCAA
GGAGTCAATTTTACCAAAAAGAAATTCGGAC
AAGCTTATTGCTCGTAAAAAAGACTGGGATC
CAAAAAAATATGGTGGTTTTGATAGTCCAAC
GGTAGCTTATTCAGTCCTAGTGGTTGCTAAG
GTGGAAAAAGGGAAATCGAAGAAGTTAAAAT
CCGTTAAAGAGTTACTAGGGATCACAATTAT
GGAAAGAAGTTCCTTTGAAAAAAATCCGATT
GACTTTTTAGAAGCTAAAGGATATAAGGAAG
TTAAAAAAGACTTAATCATTAAACTACCTAA
ATATAGTCTTTTTGAGTTAGAAAACGGTCGT
AAACGGATGCTGGCTAGTGCCGGAGAATTAC
AAAAAGGAAATGAGCTGGCTCTGCCAAGCAA
ATATGTGAATTTTTTATATTTAGCTAGTCAT
TATGAAAAGTTGAAGGGTAGTCCAGAAGATA
ACGAACAAAAACAATTGTTTGTGGAGCAGCA
TAAGCATTATTTAGATGAGATTATTGAGCAA
ATCAGTGAATTTTCTAAGCGTGTTATTTTAG
CAGATGCCAATTTAGATAAAGTTCTTAGTGC
ATATAACAAACATAGAGACAAACCAATACGT
GAACAAGCAGAAAATATTATTCATTTATTTA
CGTTGACGAATCTTGGAGCTCCCGCTGCTTT
TAAATATTTTGATACAACAATTGATCGTAAA
CGATATACGTCTACAAAAGAAGTTTTAGATG
CCACTCTTATCCATCAATCCATCACTGGTCT
TTATGAAACACGCATTGATTTGAGTCAGCTA
GGAGGTGACTGA
MDKKYSIGLDIGTNSVGWAVITDDYKVPSKK
FKVLGNTDRHSIKKNLIGALLFGSGETAEAT
RLKRTARRRYTRRKNRICYLQEIFSNEMAKV
DDSFFHRLEESFLVEEDKKHERHPIFGNIVD
EVAYHEKYPTIYHLRKKLADSTDKADLRLIY
LALAHMIKFRGHFLIEGDLNPDNSDVDKLFI
QLVQIYNQLFEENPINASRVDAKAILSARLS
KSRRLENLIAQLPGEKRNGLFGNLIALSLGL
TPNFKSNFDLAEDAKLQLSKDTYDDDLDNLL
AQIGDQYADLFLAAKNLSDAILLSDILRVNS
EITKAPLSASMIKRYDEHHQDLTLLKALVRQ
QLPEKYKEIFFDQSKNGYAGYIDGGASQEEF
YKFIKPILEKMDGTEELLVKLNREDLLRKQR
TFDNGSIPHQIHLGELHAILRRQEDFYPFLK
DNREKIEKILTFRIPYYVGPLARGNSRFAWM
TRKSEETITPWNFEEVVDKGASAQSFIERMT
NFDKNLPNEKVLPKHSLLYEYFTVYNELTKV
KYVTEGMRKPAFLSGEQKKAIVDLLFKTNRK
VTVKQLKEDYFKKIECFDSVEISGVEDRFNA
SLGAYHDLLKIIKDKDFLDNEENEDILEDIV
LTLTLFEDRGMIEERLKTYAHLFDDKVMKQL
KRRRYTGWGRLSRKLINGIRDKQSGKTILDF
LKSDGFANRNFMQLIHDDSLTFKEDIQKAQV
SGQGHSLHEQIANLAGSPAIKKGILQTVKIV
DELVKVMGHKPENIVIEMARENQTTQKGQKN
SRERMKRIEEGIKELGSQILKEHPVENTQLQ
NEKLYLYYLQNGRDMYVDQELDINRLSDYDV
DHIVPQSFIKDDSIDNKVLTRSDKNRGKSDN
VPSEEVVKKMKNYWRQLLNAKLITQRKFDNL
TKAERGGLSELDKAGFIKRQLVETRQITKHV
AQILDSRMNTKYDENDKLIREVKVITLKSKL
VSDFRKDFQFYKVREINNYHHAHDAYLNAVV
GTALIKKYPKLESEFVYGDYKVYDVRKMIAK
SEQEIGKATAKYFFYSNIMNFFKTEITLANG
EIRKRPLIETNGETGEIVWDKGRDFATVRKV
LSMPQVNIVKKTEVQTGGFSKESILPKRNSD
KLIARKKDWDPKKYGGFDSPTVAYSVLVVAK
VEKGKSKKLKSVKELLGITIMERSSFEKNPI
DFLEAKGYKEVKKDLIIKLPKYSLFELENGR
KRMLASAGELQKGNELALPSKYVNFLYLASH
YEKLKGSPEDNEQKQLFVEQHKHYLDEIIEQ
ISEFSKRVILADANLDKVLSAYNKHRDKPIR
EQAENIIHLFTLTNLGAPAAFKYFDTTIDRK
RYTSTKEVLDATLIHQSITGLYETRIDLSQL
GGD
(single underline: HNH domain;
double underline: RuvC domain)

[0338] In some embodiments, wild-type Cas9 corresponds to, or comprises the following nucleotide and/or amino acid sequences:

ATGGATAAAAAGTATTCTATTGGTTTAGACA
TCGGCACTAATTCCGTTGGATGGGCTGTCAT
AACCGATGAATACAAAGTACCTTCAAAGAAA
TTTAAGGTGTTGGGGAACACAGACCGTCATT
CGATTAAAAAGAATCTTATCGGTGCCCTCCT
ATTCGATAGTGGCGAAACGGCAGAGGCGACT
CGCCTGAAACGAACCGCTCGGAGAAGGTATA
CACGTCGCAAGAACCGAATATGTTACTTACA
AGAAATTTTTAGCAATGAGATGGCCAAAGTT
GACGATTCTTTCTTTCACCGTTTGGAAGAGT
CCTTCCTTGTCGAAGAGGACAAGAAACATGA
ACGGCACCCCATCTTTGGAAACATAGTAGAT
GAGGTGGCATATCATGAAAAGTACCCAACGA
TTTATCACCTCAGAAAAAAGCTAGTTGACTC
AACTGATAAAGCGGACCTGAGGTTAATCTAC
TTGGCTCTTGCCCATATGATAAAGTTCCGTG
GGCACTTTCTCATTGAGGGTGATCTAAATCC
GGACAACTCGGATGTCGACAAACTGTTCATC
CAGTTAGTACAAACCTATAATCAGTTGTTTG
AAGAGAACCCTATAAATGCAAGTGGCGTGGA
TGCGAAGGCTATTCTTAGCGCCCGCCTCTCT
AAATCCCGACGGCTAGAAAACCTGATCGCAC
AATTACCCGGAGAGAAGAAAAATGGGTTGTT
CGGTAACCTTATAGCGCTCTCACTAGGCCTG
ACACCAAATTTTAAGTCGAACTTCGACTTAG
CTGAAGATGCCAAATTGCAGCTTAGTAAGGA
CACGTACGATGACGATCTCGACAATCTACTG
GCACAAATTGGAGATCAGTATGCGGACTTAT
TTTTGGCTGCCAAAAACCTTAGCGATGCAAT
CCTCCTATCTGACATACTGAGAGTTAATACT
GAGATTACCAAGGCGCCGTTATCCGCTTCAA
TGATCAAAAGGTACGATGAACATCACCAAGA
CTTGACACTTCTCAAGGCCCTAGTCCGTCAG
CAACTGCCTGAGAAATATAAGGAAATATTCT
TTGATCAGTCGAAAAACGGGTACGCAGGTTA
TATTGACGGCGGAGCGAGTCAAGAGGAATTC
TACAAGTTTATCAAACCCATATTAGAGAAGA
TGGATGGGACGGAAGAGTTGCTTGTAAAACT
CAATCGCGAAGATCTACTGCGAAAGCAGCGG
ACTTTCGACAACGGTAGCATTCCACATCAAA
TCCACTTAGGCGAATTGCATGCTATACTTAG
AAGGCAGGAGGATTTTTATCCGTTCCTCAAA
GACAATCGTGAAAAGATTGAGAAAATCCTAA
CCTTTCGCATACCTTACTATGTGGGACCCCT
GGCCCGAGGGAACTCTCGGTTCGCATGGATG
ACAAGAAAGTCCGAAGAAACGATTACTCCAT
GGAATTTTGAGGAAGTTGTCGATAAAGGTGC
GTCAGCTCAATCGTTCATCGAGAGGATGACC
AACTTTGACAAGAATTTACCGAACGAAAAAG
TATTGCCTAAGCACAGTTTACTTTACGAGTA
TTTCACAGTGTACAATGAACTCACGAAAGTT
AAGTATGTCACTGAGGGCATGCGTAAACCCG
CCTTTCTAAGCGGAGAACAGAAGAAAGCAAT
AGTAGATCTGTTATTCAAGACCAACCGCAAA
GTGACAGTTAAGCAATTGAAAGAGGACTACT
TTAAGAAAATTGAATGCTTCGATTCTGTCGA
GATCTCCGGGGTAGAAGATCGATTTAATGCG
TCACTTGGTACGTATCATGACCTCCTAAAGA
TAATTAAAGATAAGGACTTCCTGGATAACGA
AGAGAATGAAGATATCTTAGAAGATATAGTG
TTGACTCTTACCCTCTTTGAAGATCGGGAAA
TGATTGAGGAAAGACTAAAAACATACGCTCA
CCTGTTCGACGATAAGGTTATGAAACAGTTA
AAGAGGCGTCGCTATACGGGCTGGGGACGAT
TGTCGCGGAAACTTATCAACGGGATAAGAGA
CAAGCAAAGTGGTAAAACTATTCTCGATTTT
CTAAAGAGCGACGGCTTCGCCAATAGGAACT
TTATGCAGCTGATCCATGATGACTCTTTAAC
CTTCAAAGAGGATATACAAAAGGCACAGGTT
TCCGGACAAGGGGACTCATTGCACGAACATA
TTGCGAATCTTGCTGGTTCGCCAGCCATCAA
AAAGGGCATACTCCAGACAGTCAAAGTAGTG
GATGAGCTAGTTAAGGTCATGGGACGTCACA
AACCGGAAAACATTGTAATCGAGATGGCACG
CGAAAATCAAACGACTCAGAAGGGGCAAAAA
AACAGTCGAGAGCGGATGAAGAGAATAGAAG
AGGGTATTAAAGAACTGGGCAGCCAGATCTT
AAAGGAGCATCCTGTGGAAAATACCCAATTG
CAGAACGAGAAACTTTACCTCTATTACCTAC
AAAATGGAAGGGACATGTATGTTGATCAGGA
ACTGGACATAAACCGTTTATCTGATTACGAC
GTCGATCACATTGTACCCCAATCCTTTTTGA
AGGACGATTCAATCGACAATAAAGTGCTTAC
ACGCTCGGATAAGAACCGAGGGAAAAGTGAC
AATGTTCCAAGCGAGGAAGTCGTAAAGAAAA
TGAAGAACTATTGGCGGCAGCTCCTAAATGC
GAAACTGATAACGCAAAGAAAGTTCGATAAC
TTAACTAAAGCTGAGAGGGGTGGCTTGTCTG
AACTTGACAAGGCCGGATTTATTAAACGTCA
GCTCGTGGAAACCCGCCAAATCACAAAGCAT
GTTGCACAGATACTAGATTCCCGAATGAATA
CGAAATACGACGAGAACGATAAGCTGATTCG
GGAAGTCAAAGTAATCACTTTAAAGTCAAAA
TTGGTGTCGGACTTCAGAAAGGATTTTCAAT
TCTATAAAGTTAGGGAGATAAATAACTACCA
CCATGCGCACGACGCTTATCTTAATGCCGTC
GTAGGGACCGCACTCATTAAGAAATACCCGA
AGCTAGAAAGTGAGTTTGTGTATGGTGATTA
CAAAGTTTATGACGTCCGTAAGATGATCGCG
AAAAGCGAACAGGAGATAGGCAAGGCTACAG
CCAAATACTTCTTTTATTCTAACATTATGAA
TTTCTTTAAGACGGAAATCACTCTGGCAAAC
GGAGAGATACGCAAACGACCTTTAATTGAAA
CCAATGGGGAGACAGGTGAAATCGTATGGGA
TAAGGGCCGGGACTTCGCGACGGTGAGAAAA
GTTTTGTCCATGCCCCAAGTCAACATAGTAA
AGAAAACTGAGGTGCAGACCGGAGGGTTTTC
AAAGGAATCGATTCTTCCAAAAAGGAATAGT
GATAAGCTCATCGCTCGTAAAAAGGACTGGG
ACCCGAAAAAGTACGGTGGCTTCGATAGCCC
TACAGTTGCCTATTCTGTCCTAGTAGTGGCA
AAAGTTGAGAAGGGAAAATCCAAGAAACTGA
AGTCAGTCAAAGAATTATTGGGGATAACGAT
TATGGAGCGCTCGTCTTTTGAAAAGAACCCC
ATCGACTTCCTTGAGGCGAAAGGTTACAAGG
AAGTAAAAAAGGATCTCATAATTAAACTACC
AAAGTATAGTCTGTTTGAGTTAGAAAATGGC
CGAAAACGGATGTTGGCTAGCGCCGGAGAGC
TTCAAAAGGGGAACGAACTCGCACTACCGTC
TAAATACGTGAATTTCCTGTATTTAGCGTCC
CATTACGAGAAGTTGAAAGGTTCACCTGAAG
ATAACGAACAGAAGCAACTTTTTGTTGAGCA
GCACAAACATTATCTCGACGAAATCATAGAG
CAAATTTCGGAATTCAGTAAGAGAGTCATCC
TAGCTGATGCCAATCTGGACAAAGTATTAAG
CGCATACAACAAGCACAGGGATAAACCCATA
CGTGAGCAGGCGGAAAATATTATCCATTTGT
TTACTCTTACCAACCTCGGCGCTCCAGCCGC
ATTCAAGTATTTTGACACAACGATAGATCGC
AAACGATACACTTCTACCAAGGAGGTGCTAG
ACGCGACACTGATTCACCAATCCATCACGGG
ATTATATGAAACTCGGATAGATTTGTCACAG
CTTGGGGGTGACGGATCCCCCAAGAAGAAGA
GGAAAGTCTCGAGCGACTACAAAGACCATGA
CGGTGATTATAAAGATCATGACATCGATTAC
AAGGATGACGATGACAAGGCTGCAGGA
MDKKYSIGLAIGTNSVGWAVITDEYKVPSKK
FKVLGNTDRHSIKKNLIGALLFDSGETAEAT
RLKRTARRRYTRRKNRICYLQEIFSNEMAKV
DDSFFHRLEESFLVEEDKKHERHPIFGNIVD
EVAYHEKYPTIYHLRKKLVDSTDKADLRLIY
LALAHMIKFRGHFLIEGDLNPDNSDVDKLFI
QLVQTYNQLFEENPINASGVDAKAILSARLS
KSRRLENLIAQLPGEKKNGLFGNLIALSLGL
TPNFKSNFDLAEDAKLQLSKDTYDDDLDNLL
AQIGDQYADLFLAAKNLSDAILLSDILRVNT
EITKAPLSASMIKRYDEHHQDLTLLKALVRQ
QLPEKYKEIFFDQSKNGYAGYIDGGASQEEF
YKFIKPILEKMDGTEELLVKLNREDLLRKQR
TFDNGSIPHQIHLGELHAILRRQEDFYPFLK
DNREKIEKILTFRIPYYVGPLARGNSRFAWM
TRKSEETITPWNFEEVVDKGASAQSFIERMT
NFDKNLPNEKVLPKHSLLYEYFTVYNELTKV
KYVTEGMRKPAFLSGEQKKAIVDLLFKTNRK
VTVKQLKEDYFKKIECFDSVEISGVEDRFNA
SLGTYHDLLKIIKDKDFLDNEENEDILEDIV
LTLTLFEDREMIEERLKTYAHLFDDKVMKQL
KRRRYTGWGRLSRKLINGIRDKQSGKTILDF
LKSDGFANRNFMQLIHDDSLTFKEDIQKAQV
SGQGDSLHEHIANLAGSPAIKKGILQTVKVV
DELVKVMGRHKPENIVIEMARENQTTQKGQK
NSRERMKRIEEGIKELGSQILKEHPVENTQL
QNEKLYLYYLQNGRDMYVDQELDINRLSDYD
VDHIVPQSFLKDDSIDNKVLTRSDKNRGKSD
NVPSEEVVKKMKNYWRQLLNAKLITQRKFDN
LTKAERGGLSELDKAGFIKRQLVETRQITKH
VAQILDSRMNTKYDENDKLIREVKVITLKSK
LVSDFRKDFQFYKVREINNYHHAHDAYLNAV
VGTALIKKYPKLESEFVYGDYKVYDVRKMIA
KSEQEIGKATAKYFFYSNIMNFFKTEITLAN
GEIRKRPLIETNGETGEIVWDKGRDFATVRK
VLSMPQVNIVKKTEVQTGGFSKESILPKRNS
DKLIARKKDWDPKKYGGFDSPTVAYSVLVVA
KVEKGKSKKLKSVKELLGITIMERSSFEKNP
IDFLEAKGYKEVKKDLIIKLPKYSLFELENG
RKRMLASAGELQKGNELALPSKYVNFLYLAS
HYEKLKGSPEDNEQKQLFVEQHKHYLDEIIE
QISEFSKRVILADANLDKVLSAYNKHRDKPI
REQAENIIHLFTLTNLGAPAAFKYFDTTIDR
KRYTSTKEVLDATLIHQSITGLYETRIDLSQ
LGGD
(single underline: HNH domain;
double underline: RuvC domain).

[0339] In some embodiments, wild-type Cas9 corresponds to Cas9 from Streptococcus pyogenes (NCBI Reference Sequence: NC_002737.2 (nucleotide sequence as follows); and Uniprot Reference Sequence: Q99ZW2 (amino acid sequence as follows):

ATGGATAAGAAATACTCAATAGGCTTAGATA
TCGGCACAAATAGCGTCGGATGGGCGGTGAT
CACTGATGAATATAAGGTTCCGTCTAAAAAG
TTCAAGGTTCTGGGAAATACAGACCGCCACA
GTATCAAAAAAAATCTTATAGGGGCTCTTTT
ATTTGACAGTGGAGAGACAGCGGAAGCGACT
CGTCTCAAACGGACAGCTCGTAGAAGGTATA
CACGTCGGAAGAATCGTATTTGTTATCTACA
GGAGATTTTTTCAAATGAGATGGCGAAAGTA
GATGATAGTTTCTTTCATCGACTTGAAGAGT
CTTTTTTGGTGGAAGAAGACAAGAAGCATGA
ACGTCATCCTATTTTTGGAAATATAGTAGAT
GAAGTTGCTTATCATGAGAAATATCCAACTA
TCTATCATCTGCGAAAAAAATTGGTAGATTC
TACTGATAAAGCGGATTTGCGCTTAATCTAT
TTGGCCTTAGCGCATATGATTAAGTTTCGTG
GTCATTTTTTGATTGAGGGAGATTTAAATCC
TGATAATAGTGATGTGGACAAACTATTTATC
CAGTTGGTACAAACCTACAATCAATTATTTG
AAGAAAACCCTATTAACGCAAGTGGAGTAGA
TGCTAAAGCGATTCTTTCTGCACGATTGAGT
AAATCAAGACGATTAGAAAATCTCATTGCTC
AGCTCCCCGGTGAGAAGAAAAATGGCTTATT
TGGGAATCTCATTGCTTTGTCATTGGGTTTG
ACCCCTAATTTTAAATCAAATTTTGATTTGG
CAGAAGATGCTAAATTACAGCTTTCAAAAGA
TACTTACGATGATGATTTAGATAATTTATTG
GCGCAAATTGGAGATCAATATGCTGATTTGT
TTTTGGCAGCTAAGAATTTATCAGATGCTAT
TTTACTTTCAGATATCCTAAGAGTAAATACT
GAAATAACTAAGGCTCCCCTATCAGCTTCAA
TGATTAAACGCTACGATGAACATCATCAAGA
CTTGACTCTTTTAAAAGCTTTAGTTCGACAA
CAACTTCCAGAAAAGTATAAAGAAATCTTTT
TTGATCAATCAAAAAACGGATATGCAGGTTA
TATTGATGGGGGAGCTAGCCAAGAAGAATTT
TATAAATTTATCAAACCAATTTTAGAAAAAA
TGGATGGTACTGAGGAATTATTGGTGAAACT
AAATCGTGAAGATTTGCTGCGCAAGCAACGG
ACCTTTGACAACGGCTCTATTCCCCATCAAA
TTCACTTGGGTGAGCTGCATGCTATTTTGAG
AAGACAAGAAGACTTTTATCCATTTTTAAAA
GACAATCGTGAGAAGATTGAAAAAATCTTGA
CTTTTCGAATTCCTTATTATGTTGGTCCATT
GGCGCGTGGCAATAGTCGTTTTGCATGGATG
ACTCGGAAGTCTGAAGAAACAATTACCCCAT
GGAATTTTGAAGAAGTTGTCGATAAAGGTGC
TTCAGCTCAATCATTTATTGAACGCATGACA
AACTTTGATAAAAATCTTCCAAATGAAAAAG
TACTACCAAAACATAGTTTGCTTTATGAGTA
TTTTACGGTTTATAACGAATTGACAAAGGTC
AAATATGTTACTGAAGGAATGCGAAAACCAG
CATTTCTTTCAGGTGAACAGAAGAAAGCCAT
TGTTGATTTACTCTTCAAAACAAATCGAAAA
GTAACCGTTAAGCAATTAAAAGAAGATTATT
TCAAAAAAATAGAATGTTTTGATAGTGTTGA
AATTTCAGGAGTTGAAGATAGATTTAATGCT
TCATTAGGTACCTACCATGATTTGCTAAAAA
TTATTAAAGATAAAGATTTTTTGGATAATGA
AGAAAATGAAGATATCTTAGAGGATATTGTT
TTAACATTGACCTTATTTGAAGATAGGGAGA
TGATTGAGGAAAGACTTAAAACATATGCTCA
CCTCTTTGATGATAAGGTGATGAAACAGCTT
AAACGTCGCCGTTATACTGGTTGGGGACGTT
TGTCTCGAAAATTGATTAATGGTATTAGGGA
TAAGCAATCTGGCAAAACAATATTAGATTTT
TTGAAATCAGATGGTTTTGCCAATCGCAATT
TTATGCAGCTGATCCATGATGATAGTTTGAC
ATTTAAAGAAGACATTCAAAAAGCACAAGTG
TCTGGACAAGGCGATAGTTTACATGAACATA
TTGCAAATTTAGCTGGTAGCCCTGCTATTAA
AAAAGGTATTTTACAGACTGTAAAAGTTGTT
GATGAATTGGTCAAAGTAATGGGGCGGCATA
AGCCAGAAAATATCGTTATTGAAATGGCACG
TGAAAATCAGACAACTCAAAAGGGCCAGAAA
AATTCGCGAGAGCGTATGAAACGAATCGAAG
AAGGTATCAAAGAATTAGGAAGTCAGATTCT
TAAAGAGCATCCTGTTGAAAATACTCAATTG
CAAAATGAAAAGCTCTATCTCTATTATCTCC
AAAATGGAAGAGACATGTATGTGGACCAAGA
ATTAGATATTAATCGTTTAAGTGATTATGAT
GTCGATCACATTGTTCCACAAAGTTTCCTTA
AAGACGATTCAATAGACAATAAGGTCTTAAC
GCGTTCTGATAAAAATCGTGGTAAATCGGAT
AACGTTCCAAGTGAAGAAGTAGTCAAAAAGA
TGAAAAACTATTGGAGACAACTTCTAAACGC
CAAGTTAATCACTCAACGTAAGTTTGATAAT
TTAACGAAAGCTGAACGTGGAGGTTTGAGTG
AACTTGATAAAGCTGGTTTTATCAAACGCCA
ATTGGTTGAAACTCGCCAAATCACTAAGCAT
GTGGCACAAATTTTGGATAGTCGCATGAATA
CTAAATACGATGAAAATGATAAACTTATTCG
AGAGGTTAAAGTGATTACCTTAAAATCTAAA
TTAGTTTCTGACTTCCGAAAAGATTTCCAAT
TCTATAAAGTACGTGAGATTAACAATTACCA
TCATGCCCATGATGCGTATCTAAATGCCGTC
GTTGGAACTGCTTTGATTAAGAAATATCCAA
AACTTGAATCGGAGTTTGTCTATGGTGATTA
TAAAGTTTATGATGTTCGTAAAATGATTGCT
AAGTCTGAGCAAGAAATAGGCAAAGCAACCG
CAAAATATTTCTTTTACTCTAATATCATGAA
CTTCTTCAAAACAGAAATTACACTTGCAAAT
GGAGAGATTCGCAAACGCCCTCTAATCGAAA
CTAATGGGGAAACTGGAGAAATTGTCTGGGA
TAAAGGGCGAGATTTTGCCACAGTGCGCAAA
GTATTGTCCATGCCCCAAGTCAATATTGTCA
AGAAAACAGAAGTACAGACAGGCGGATTCTC
CAAGGAGTCAATTTTACCAAAAAGAAATTCG
GACAAGCTTATTGCTCGTAAAAAAGACTGGG
ATCCAAAAAAATATGGTGGTTTTGATAGTCC
AACGGTAGCTTATTCAGTCCTAGTGGTTGCT
AAGGTGGAAAAAGGGAAATCGAAGAAGTTAA
AATCCGTTAAAGAGTTACTAGGGATCACAAT
TATGGAAAGAAGTTCCTTTGAAAAAAATCCG
ATTGACTTTTTAGAAGCTAAAGGATATAAGG
AAGTTAAAAAAGACTTAATCATTAAACTACC
TAAATATAGTCTTTTTGAGTTAGAAAACGGT
CGTAAACGGATGCTGGCTAGTGCCGGAGAAT
TACAAAAAGGAAATGAGCTGGCTCTGCCAAG
CAAATATGTGAATTTTTTATATTTAGCTAGT
CATTATGAAAAGTTGAAGGGTAGTCCAGAAG
ATAACGAACAAAAACAATTGTTTGTGGAGCA
GCATAAGCATTATTTAGATGAGATTATTGAG
CAAATCAGTGAATTTTCTAAGCGTGTTATTT
TAGCAGATGCCAATTTAGATAAAGTTCTTAG
TGCATATAACAAACATAGAGACAAACCAATA
CGTGAACAAGCAGAAAATATTATTCATTTAT
TTACGTTGACGAATCTTGGAGCTCCCGCTGC
TTTTAAATATTTTGATACAACAATTGATCGT
AAACGATATACGTCTACAAAAGAAGTTTTAG
ATGCCACTCTTATCCATCAATCCATCACTGG
TCTTTATGAAACACGCATTGATTTGAGTCAG
CTAGGAGGTGACTGA
MDKKYSIGLDIGTNSVGWAVITDEYKVPSKK
FKVLGNTDRHSIKKNLIGALLFDSGETAEAT
RLKRTARRRYTRRKNRICYLQEIFSNEMAKV
DDSFFHRLEESFLVEEDKKHERHPIFGNIVD
EVAYHEKYPTIYHLRKKLVDSTDKADLRLIY
LALAHMIKFRGHFLIEGDLNPDNSDVDKLFI
QLVQTYNQLFEENPINASGVDAKAILSARLS
KSRRLENLIAQLPGEKKNGLFGNLIALSLGL
TPNFKSNFDLAEDAKLQLSKDTYDDDLDNLL
AQIGDQYADLFLAAKNLSDAILLSDILRVNT
EITKAPLSASMIKRYDEHHQDLTLLKALVRQ
QLPEKYKEIFFDQSKNGYAGYIDGGASQEEF
YKFIKPILEKMDGTEELLVKLNREDLLRKQR
TFDNGSIPHQIHLGELHAILRRQEDFYPFLK
DNREKIEKILTFRIPYYVGPLARGNSRFAWM
TRKSEETITPWNFEEVVDKGASAQSFIERMT
NFDKNLPNEKVLPKHSLLYEYFTVYNELTKV
KYVTEGMRKPAFLSGEQKKAIVDLLFKTNRK
VTVKQLKEDYFKKIECFDSVEISGVEDRFNA
SLGTYHDLLKIIKDKDFLDNEENEDILEDIV
LTLTLFEDREMIEERLKTYAHLFDDKVMKQL
KRRRYTGWGRLSRKLINGIRDKQSGKTILDF
LKSDGFANRNFMQLIHDDSLTFKEDIQKAQV
SGQGDSLHEHIANLAGSPAIKKGILQTVKVV
DELVKVMGRHKPENIVIEMARENQTTQKGQK
NSRERMKRIEEGIKELGSQILKEHPVENTQL
QNEKLYLYYLQNGRDMYVDQELDINRLSDYD
VDHIVPQSFLKDDSIDNKVLTRSDKNRGKSD
NVPSEEVVKKMKNYWRQLLNAKLITQRKFDN
LTKAERGGLSELDKAGFIKRQLVETRQITKH
VAQILDSRMNTKYDENDKLIREVKVITLKSK
LVSDFRKDFQFYKVREINNYHHAHDAYLNAV
VGTALIKKYPKLESEFVYGDYKVYDVRKMIA
KSEQEIGKATAKYFFYSNIMNFFKTEITLAN
GEIRKRPLIETNGETGEIVWDKGRDFATVRK
VLSMPQVNIVKKTEVQTGGFSKESILPKRNS
DKLIARKKDWDPKKYGGFDSPTVAYSVLVVA
KVEKGKSKKLKSVKELLGITIMERSSFEKNP
IDFLEAKGYKEVKKDLIIKLPKYSLFELENG
RKRMLASAGELQKGNELALPSKYVNFLYLAS
HYEKLKGSPEDNEQKQLFVEQHKHYLDEIIE
QISEFSKRVILADANLDKVLSAYNKHRDKPI
REQAENIIHLFTLTNLGAPAAFKYFDTTIDR
KRYTSTKEVLDATLIHQSITGLYETRIDLSQ
LGGD
(single underline: HNH domain;
double underline: RuvC domain)

[0340] In some embodiments, Cas9 refers to Cas9 from: Corynebacterium ulcerans (NCBI Refs: NC_015683.1, NC_017317.1); Corynebacterium diphtheria (NCBI Refs: NC_016782.1, NC_016786.1); Spiroplasma syrphidicola (NCBI Ref: NC_021284.1); Prevotella intermedia (NCBI Ref: NC_017861.1); Spiroplasma taiwanense (NCBI Ref: NC_021846.1); Streptococcus iniae (NCBI Ref: NC_021314.1); Belliella baltica (NCBI Ref: NC_018010.1); Psychroflexus torquis I (NCBI Ref: NC_018721.1); Streptococcus thermophilus (NCBI Ref: YP_820832.1), Listeria innocua (NCBI Ref: NP_472073.1), Campylobacter jejuni (NCBI Ref: YP_002344900.1) or Neisseria meningitidis (NCBI Ref: YP_002342100.1) or to a Cas9 from any other organism.

[0341] It should be appreciated that additional Cas9 proteins (e.g., a nuclease dead Cas9 (dCas9), a Cas9 nickase (nCas9), or a nuclease active Cas9), including variants and homologs thereof, are within the scope of this disclosure. Exemplary Cas9 proteins include, without limitation, those provided below. In some embodiments, the Cas9 protein is a nuclease dead Cas9 (dCas9). In some embodiments, the Cas9 protein is a Cas9 nickase (nCas9). In some embodiments, the Cas9 protein is a nuclease active Cas9.

[0342] In some embodiments, the Cas9 domain is a nuclease-inactive Cas9 domain (dCas9). For example, the dCas9 domain may bind to a duplexed nucleic acid molecule (e.g., via a gRNA molecule) without cleaving either strand of the duplexed nucleic acid molecule. In some embodiments, the nuclease-inactive dCas9 domain comprises a D10X mutation and a H840X mutation of the amino acid sequence set forth herein, or a corresponding mutation in any of the amino acid sequences provided herein, wherein X is any amino acid change. In some embodiments, the nuclease-inactive dCas9 domain comprises a D10A mutation and a H840A mutation of the amino acid sequence set forth herein, or a corresponding mutation in any of the amino acid sequences provided herein. As one example, a nuclease-inactive Cas9 domain comprises the amino acid sequence set forth in Cloning vector pPlatTET-gRNA2 (Accession No. BAV54124).

[0343] The amino acid sequence of an exemplary catalytically inactive Cas9 (dCas9) is as follows:

MDKKYSIGLAIGTNSVGWAVITDEYKVPSKK
FKVLGNTDRHSIKKNLIGALLFDSGETAEAT
RLKRTARRRYTRRKNRICYLQEIFSNEMAKV
DDSFFHRLEESFLVEEDKKHERHPIFGNIVD
EVAYHEKYPTIYHLRKKLVDSTDKADLRLIY
LALAHMIKFRGHFLIEGDLNPDNSDVDKLFI
QLVQTYNQLFEENPINASGVDAKAILSARLS
KSRRLENLIAQLPGEKKNGLFGNLIALSLGL
TPNFKSNFDLAEDAKLQLSKDTYDDDLDNLL
AQIGDQYADLFLAAKNLSDAILLSDILRVNT
EITKAPLSASMIKRYDEHHQDLTLLKALVRQ
QLPEKYKEIFFDQSKNGYAGYIDGGASQEEF
YKFIKPILEKMDGTEELLVKLNREDLLRKQR
TFDNGSIPHQIHLGELHAILRRQEDFYPFLK
DNREKIEKILTFRIPYYVGPLARGNSRFAWM
TRKSEETITPWNFEEVVDKGASAQSFIERMT
NFDKNLPNEKVLPKHSLLYEYFTVYNELTKV
KYVTEGMRKPAFLSGEQKKAIVDLLFKTNRK
VTVKQLKEDYFKKIECFDSVEISGVEDRFNA
SLGTYHDLLKIIKDKDFLDNEENEDILEDIV
LTLTLFEDREMIEERLKTYAHLFDDKVMKQL
KRRRYTGWGRLSRKLINGIRDKQSGKTILDF
LKSDGFANRNFMQLIHDDSLTFKEDIQKAQV
SGQGDSLHEHIANLAGSPAIKKGILQTVKVV
DELVKVMGRHKPENIVIEMARENQTTQKGQK
NSRERMKRIEEGIKELGSQILKEHPVENTQL
QNEKLYLYYLQNGRDMYVDQELDINRLSDYD
VDAIVPQSFLKDDSIDNKVLTRSDKNRGKSD
NVPSEEVVKKMKNYWRQLLNAKLITQRKFDN
LTKAERGGLSELDKAGFIKRQLVETRQITKH
VAQILDSRMNTKYDENDKLIREVKVITLKSK
LVSDFRKDFQFYKVREINNYHHAHDAYLNAV
VGTALIKKYPKLESEFVYGDYKVYDVRKMIA
KSEQEIGKATAKYFFYSNIMNFFKTEITLAN
GEIRKRPLIETNGETGEIVWDKGRDFATVRK
VLSMPQVNIVKKTEVQTGGFSKESILPKRNS
DKLIARKKDWDPKKYGGFDSPTVAYSVLVVA
KVEKGKSKKLKSVKELLGITIMERSSFEKNP
IDFLEAKGYKEVKKDLIIKLPKYSLFELENG
RKRMLASAGELQKGNELALPSKYVNFLYLAS
HYEKLKGSPEDNEQKQLFVEQHKHYLDEIIE
QISEFSKRVILADANLDKVLSAYNKHRDKPI
REQAENIIHLFTLTNLGAPAAFKYFDTTIDR
KRYTSTKEVLDATLIHQSITGLYETRIDLSQ
LGGD

(see, e.g., Qi et al., “Repurposing CRISPR as an RNA-guided platform for sequence-specific control of gene expression.” Cell. 2013; 152(5):1173-83, the entire contents of which are incorporated herein by reference).

[0344] Additional suitable nuclease-inactive dCas9 domains will be apparent to those of skill in the art based on this disclosure and knowledge in the field, and are within the scope of this disclosure. Such additional exemplary suitable nuclease-inactive Cas9 domains include, but are not limited to, D10A/H840A, D10A/D839A/H840A, and D10A/D839A/H840A/N863A mutant domains (See, e.g., Prashant et al., CAS9 transcriptional activators for target specificity screening and paired nickases for cooperative genome engineering. Nature Biotechnology. 2013; 31(9): 833-838, the entire contents of which are incorporated herein by reference).

[0345] In some embodiments, a Cas9 nuclease has an inactive (e.g., an inactivated) DNA cleavage domain, that is, the Cas9 is a nickase, referred to as an “nCas9” protein (for “nickase” Cas9). A nuclease-inactivated Cas9 protein may interchangeably be referred to as a “dCas9” protein (for nuclease-“dead” Cas9) or catalytically inactive Cas9. Methods for generating a Cas9 protein (or a fragment thereof) having an inactive DNA cleavage domain are known (See, e.g., Jinek et al., Science. 337:816-821(2012); Qi et al., “Repurposing CRISPR as an RNA-Guided Platform for Sequence-Specific Control of Gene Expression” (2013) Cell. 28; 152(5):1173-83, the entire contents of each of which are incorporated herein by reference). For example, the DNA cleavage domain of Cas9 is known to include two subdomains, the HNH nuclease subdomain and the RuvC1 subdomain. The HNH subdomain cleaves the strand complementary to the gRNA, whereas the RuvC1 subdomain cleaves the non-complementary strand. Mutations within these subdomains can silence the nuclease activity of Cas9. For example, the mutations D10A and H840A completely inactivate the nuclease activity of S. pyogenes Cas9 (Jinek et al., Science. 337:816-821(2012); Qi et al., Cell. 28; 152(5):1173-83 (2013)).

[0346] In some embodiments, the dCas9 domain comprises an amino acid sequence that is at least 60%, at least 65%, at least 70%, at least 75%, at least 80%, at least 85%, at least 90%, at least 95%, at least 96%, at least 97%, at least 98%, at least 99%, or at least 99.5% identical to any one of the dCas9 domains provided herein. In some embodiments, the Cas9 domain comprises an amino acid sequences that has 1, 2, 3, 4, 5, 6, 7, 8, 9, 10, 11, 12, 13, 14, 15, 16, 17, 18, 19, 20, 21, 22, 21, 24, 25, 26, 27, 28, 29, 30, 31, 32, 33, 34, 35, 36, 37, 38, 39, 40, 41, 42, 43, 44, 45, 46, 47, 48, 49, 50 or more or more mutations compared to any one of the amino acid sequences set forth herein. In some embodiments, the Cas9 domain comprises an amino acid sequence that has at least 10, at least 15, at least 20, at least 30, at least 40, at least 50, at least 60, at least 70, at least 80, at least 90, at least 100, at least 150, at least 200, at least 250, at least 300, at least 350, at least 400, at least 500, at least 600, at least 700, at least 800, at least 900, at least 1000, at least 1100, or at least 1200 identical contiguous amino acid residues as compared to any one of the amino acid sequences set forth herein.

[0347] In some embodiments, dCas9 corresponds to, or comprises in part or in whole, a Cas9 amino acid sequence having one or more mutations that inactivate the Cas9 nuclease activity. For example, in some embodiments, a dCas9 domain comprises D10A and an H840A mutation or corresponding mutations in another Cas9.

[0348] In some embodiments, the dCas9 comprises the amino acid sequence of dCas9 (D10A and H840A):

MDKKYSIGLAIGTNSVGWAVITDEYKVPSKK
FKVLGNTDRHSIKKNLIGALLFDSGETAEAT
RLKRTARRRYTRRKNRICYLQEIFSNEMAKV
DDSFFHRLEESFLVEEDKKHERHPIFGNIVD
EVAYHEKYPTIYHLRKKLVDSTDKADLRLIY
LALAHMIKFRGHFLIEGDLNPDNSDVDKLFI
QLVQTYNQLFEENPINASGVDAKAILSARLS
KSRRLENLIAQLPGEKKNGLFGNLIALSLGL
TPNFKSNFDLAEDAKLQLSKDTYDDDLDNLL
AQIGDQYADLFLAAKNLSDAILLSDILRVNT
EITKAPLSASMIKRYDEHHQDLTLLKALVRQ
QLPEKYKEIFFDQSKNGYAGYIDGGASQEEF
YKFIKPILEKMDGTEELLVKLNREDLLRKQR
TFDNGSIPHQIHLGELHAILRRQEDFYPFLK
DNREKIEKILTFRIPYYVGPLARGNSRFAWM
TRKSEETITPWNFEEVVDKGASAQSFIERMT
NFDKNLPNEKVLPKHSLLYEYFTVYNELTKV
KYVTEGMRKPAFLSGEQKKAIVDLLFKTNRK
VTVKQLKEDYFKKIECFDSVEISGVEDRFNA
SLGTYHDLLKIIKDKDFLDNEENEDILEDIV
LTLTLFEDREMIEERLKTYAHLFDDKVMKQL
KRRRYTGWGRLSRKLINGIRDKQSGKTILDF
LKSDGFANRNFMQLIHDDSLTFKEDIQKAQV
SGQGDSLHEHIANLAGSPAIKKGILQTVKVV
DELVKVMGRHKPENIVIEMARENQTTQKGQK
NSRERMKRIEEGIKELGSQILKEHPVENTQL
QNEKLYLYYLQNGRDMYVDQELDINRLSDYD
VDAIVPQSFLKDDSIDNKVLTRSDKNRGKSD
NVPSEEVVKKMKNYWRQLLNAKLITQRKFDN
LTKAERGGLSELDKAGFIKRQLVETRQITKH
VAQILDSRMNTKYDENDKLIREVKVITLKSK
LVSDFRKDFQFYKVREINNYHHAHDAYLNAV
VGTALIKKYPKLESEFVYGDYKVYDVRKMIA
KSEQEIGKATAKYFFYSNIMNFFKTEITLAN
GEIRKRPLIETNGETGEIVWDKGRDFATVRK
VLSMPQVNIVKKTEVQTGGFSKESILPKRNS
DKLIARKKDWDPKKYGGFDSPTVAYSVLVVA
KVEKGKSKKLKSVKELLGITIMERSSFEKNP
IDFLEAKGYKEVKKDLIIKLPKYSLFELENG
RKRMLASAGELQKGNELALPSKYVNFLYLAS
HYEKLKGSPEDNEQKQLFVEQHKHYLDEIIE
QISEFSKRVILADANLDKVLSAYNKHRDKPI
REQAENIIHLFTLTNLGAPAAFKYFDTTIDR
KRYTSTKEVLDATLIHQSITGLYETRIDLSQ
LGGD
(single underline: HNH domain;
double underline: RuvC domain).

[0349] In some embodiments, the Cas9 domain comprises a D10A mutation, while the residue at position 840 remains a histidine in the amino acid sequence provided above, or at corresponding positions in any of the amino acid sequences provided herein.

[0350] In other embodiments, dCas9 variants having mutations other than D10A and H840A are provided, which, e.g., result in nuclease inactivated Cas9 (dCas9). Such mutations, by way of example, include other amino acid substitutions at D10 and H840, or other substitutions within the nuclease domains of Cas9 (e.g., substitutions in the HNH nuclease subdomain and/or the RuvC1 subdomain). In some embodiments, variants or homologues of dCas9 are provided which are at least about 70% identical, at least about 80% identical, at least about 90% identical, at least about 95% identical, at least about 98% identical, at least about 99% identical, at least about 99.5% identical, or at least about 99.9% identical. In some embodiments, variants of dCas9 are provided having amino acid sequences which are shorter, or longer, by about 5 amino acids, by about 10 amino acids, by about 15 amino acids, by about 20 amino acids, by about 25 amino acids, by about 30 amino acids, by about 40 amino acids, by about 50 amino acids, by about 75 amino acids, by about 100 amino acids or more.

[0351] In some embodiments, the Cas9 domain is a Cas9 nickase. The Cas9 nickase may be a Cas9 protein that is capable of cleaving only one strand of a duplexed nucleic acid molecule (e.g., a duplexed DNA molecule). In some embodiments, the Cas9 nickase cleaves the target strand of a duplexed nucleic acid molecule, meaning that the Cas9 nickase cleaves the strand that is base paired to (complementary to) a gRNA (e.g., an sgRNA) that is bound to the Cas9. In some embodiments, a Cas9 nickase comprises a D10A mutation and has a histidine at position 840. In some embodiments, the Cas9 nickase cleaves the non-target, non-base-edited strand of a duplexed nucleic acid molecule, meaning that the Cas9 nickase cleaves the strand that is not base paired to a gRNA (e.g., an sgRNA) that is bound to the Cas9. In some embodiments, a Cas9 nickase comprises an H840A mutation and has an aspartic acid residue at position 10, or a corresponding mutation. In some embodiments, the Cas9 nickase comprises an amino acid sequence that is at least 60%, at least 65%, at least 70%, at least 75%, at least 80%, at least 85%, at least 90%, at least 95%, at least 96%, at least 97%, at least 98%, at least 99%, or at least 99.5% identical to any one of the Cas9 nickases provided herein. Additional suitable Cas9 nickases will be apparent to those of skill in the art based on this disclosure and knowledge in the field, and are within the scope of this disclosure.

[0352] The amino acid sequence of an exemplary catalytically Cas9 nickase (nCas9) is as follows:

MDKKYSIGLAIGTNSVGWAVITDEYKVPSKK
FKVLGNTDRHSIKKNLIGALLFDSGETAEAT
RLKRTARRRYTRRKNRICYLQEIFSNEMAKV
DDSFFHRLEESFLVEEDKKHERHPIFGNIVD
EVAYHEKYPTIYHLRKKLVDSTDKADLRLIY
LALAHMIKFRGHFLIEGDLNPDNSDVDKLFI
QLVQTYNQLFEENPINASGVDAKAILSARLS
KSRRLENLIAQLPGEKKNGLFGNLIALSLGL
TPNFKSNFDLAEDAKLQLSKDTYDDDLDNLL
AQIGDQYADLFLAAKNLSDAILLSDILRVNT
EITKAPLSASMIKRYDEHHQDLTLLKALVRQ
QLPEKYKEIFFDQSKNGYAGYIDGGASQEEF
YKFIKPILEKMDGTEELLVKLNREDLLRKQR
TFDNGSIPHQIHLGELHAILRRQEDFYPFLK
DNREKIEKILTFRIPYYVGPLARGNSRFAWM
TRKSEETITPWNFEEVVDKGASAQSFIERMT
NFDKNLPNEKVLPKHSLLYEYFTVYNELTKV
KYVTEGMRKPAFLSGEQKKAIVDLLFKTNRK
VTVKQLKEDYFKKIECFDSVEISGVEDRFNA
SLGTYHDLLKIIKDKDFLDNEENEDILEDIV
LTLTLFEDREMIEERLKTYAHLFDDKVMKQL
KRRRYTGWGRLSRKLINGIRDKQSGKTILDF
LKSDGFANRNFMQLIHDDSLTFKEDIQKAQV
SGQGDSLHEHIANLAGSPAIKKGILQTVKVV
DELVKVMGRHKPENIVIEMARENQTTQKGQK
NSRERMKRIEEGIKELGSQILKEHPVENTQL
QNEKLYLYYLQNGRDMYVDQELDINRLSDYD
VDHIVPQSFLKDDSIDNKVLTRSDKNRGKSD
NVPSEEVVKKMKNYWRQLLNAKLITQRKFDN
LTKAERGGLSELDKAGFIKRQLVETRQITKH
VAQILDSRMNTKYDENDKLIREVKVITLKSK
LVSDFRKDFQFYKVREINNYHHAHDAYLNAV
VGTALIKKYPKLESEFVYGDYKVYDVRKMIA
KSEQEIGKATAKYFFYSNIMNFFKTEITLAN
GEIRKRPLIETNGETGEIVWDKGRDFATVRK
VLSMPQVNIVKKTEVQTGGFSKESILPKRNS
DKLIARKKDWDPKKYGGFDSPTVAYSVLVVA
KVEKGKSKKLKSVKELLGITIMERSSFEKNP
IDFLEAKGYKEVKKDLIIKLPKYSLFELENG
RKRMLASAGELQKGNELALPSKYVNFLYLAS
HYEKLKGSPEDNEQKQLFVEQHKHYLDEIIE
QISEFSKRVILADANLDKVLSAYNKHRDKPI
REQAENIIHLFTLTNLGAPAAFKYFDTTIDR
KRYTSTKEVLDATLIHQSITGLYETRIDLSQ
LGGD

[0353] In some embodiments, Cas9 refers to a Cas9 from archaea (e.g., nanoarchaea), which constitute a domain and kingdom of single-celled prokaryotic microbes. In some embodiments, the programmable nucleotide binding protein may be a CasX or CasY protein, which have been described in, for example, Burstein et al., “New CRISPR-Cas systems from uncultivated microbes.” Cell Res. 2017 Feb. 21. doi: 10.1038/cr.2017.21, the entire contents of which is hereby incorporated by reference. Using genome-resolved metagenomics, a number of CRISPR-Cas systems were identified, including the first reported Cas9 in the archaeal domain of life. This divergent Cas9 protein was found in little-studied nanoarchaea as part of an active CRISPR-Cas system. In bacteria, two previously unknown systems were discovered, CRISPR-CasX and CRISPR-CasY, which are among the most compact systems yet discovered. In some embodiments, in a base editor system described herein Cas9 is replaced by CasX, or a variant of CasX. In some embodiments, in a base editor system described herein Cas9 is replaced by CasY, or a variant of CasY. It should be appreciated that other RNA-guided DNA binding proteins may be used as a nucleic acid programmable DNA binding protein (napDNAbp), and are within the scope of this disclosure.

[0354] In some embodiments, the nucleic acid programmable DNA binding protein (napDNAbp) of any of the fusion proteins provided herein may be a CasX or CasY protein. In some embodiments, the napDNAbp is a CasX protein. In some embodiments, the napDNAbp is a CasY protein. In some embodiments, the napDNAbp comprises an amino acid sequence that is at least 85%, at least 90%, at least 91%, at least 92%, at least 93%, at least 94%, at least 95%, at least 96%, at least 97%, at least 98%, at least 99%, or at ease 99.5% identical to a naturally-occurring CasX or CasY protein. In some embodiments, the programmable nucleotide binding protein is a naturally-occurring CasX or CasY protein. In some embodiments, the programmable nucleotide binding protein comprises an amino acid sequence that is at least 85%, at least 90%, at least 91%, at least 92%, at least 93%, at least 94%, at least 95%, at least 96%, at least 97%, at least 98%, at least 99%, or at ease 99.5% identical to any CasX or CasY protein described herein. It should be appreciated that CasX and CasY from other bacterial species may also be used in accordance with the present disclosure.

[0355] An exemplary CasX ((uniprot.org/uniprot/F0NN87; uniprot.org/uniprot/F0NH53) tr|F0NN87|F0NN87_SULIHCRISPR-associatedCasx protein OS=Sulfolobus islandicus (strain HVE10/4) GN=SiH_0402 PE=4 SV=1) amino acid sequence is as follows:

MEVPLYNIFGDNYIIQVATEAENSTIYNNKV
EIDDEELRNVLNLAYKIAKNNEDAAAERRGK
AKKKKGEEGETTTSNIILPLSGNDKNPWTET
LKCYNFPTTVALSEVFKNFSQVKECEEVSAP
SFVKPEFYEFGRSPGMVERTRRVKLEVEPHY
LIIAAAGWVLTRLGKAKVSEGDYVGVNVFTP
TRGILYSLIQNVNGIVPGIKPETAFGLWIAR
KVVSSVTNPNVSVVRIYTISDAVGQNPTTIN
GGFSIDLTKLLEKRYLLSERLEAIARNALSI
SSNMRERYIVLANYIYEYLTGSKRLEDLLY
FANRDLIMNLNSDDGKVRDLKLISAYVNGEL
IRGEG.

[0356] An exemplary CasX (>tr|F0NH53|F0NH53_SULIR CRISPR associated protein, Casx OS=Sulfolobus islandicus (strain REY15A) GN=SiRe_0771 PE=4 SV=1) amino acid sequence is as follows:

MEVPLYNIFGDNYIIQVATEAENSTIYNNKV
EIDDEELRNVLNLAYKIAKNNEDAAAERRGK
AKKKKGEEGETTTSNIILPLSGNDKNPWTET
LKCYNFPTTVALSEVFKNFSQVKECEEVSAP
SFVKPEFYKFGRSPGMVERTRRVKLEVEPHY
LIMAAAGWVLTRLGKAKVSEGDYVGVNVFTP
TRGILYSLIQNVNGIVPGIKPETAFGLWIAR
KVVSSVTNPNVSVVSIYTISDAVGQNPTTIN
GGFSIDLTKLLEKRDLLSERLEAIARNALSI
SSNMRERYIVLANYIYEYLTGSKRLEDLLYF
ANRDLIMNLNSDDGKVRDLKLISAYVNGELI
RGEG.

[0357] Deltaproteobacteria CasX

MEKRINKIRKKLSADNATKPVSRSGPMKTLLVRVMTDDLKKRLEKRRKKP
EVMPQVISNNAANNLRMLLDDYTKMKEAILQVYWQEFKDDHVGLMCKFAQ
PASKKIDQNKLKPEMDEKGNLTTAGFACSQCGQPLFVYKLEQVSEKGKAY
TNYFGRCNVAEHEKLILLAQLKPVKDSDEAVTYSLGKFGQRALDFYSIHV
TKESTHPVKPLAQIAGNRYASGPVGKALSDACMGTIASFLSKYQDIIIEH
QKVVKGNQKRLESLRELAGKENLEYPSVTLPPQPHTKEGVDfAYNEVIAR
VRMWVNLNLWQKLKLSRDDAKPLLRLKGFPSFPVVERRENEVDWWNTINE
VKKLIDAKRDMGRVFWSGVTAEKRNTILEGYNYLPNENDHKKREGSLENP
KKPAKRQFGDLLLYLEKKYAGDWGKVFDEAWERIDKKIAGLTSHIEREEA
RNAEDAQSKAVLTDWLRAKASFVLERLKEMDEKEFYACEIQLQKWYGDLR
GNPFAVEAENRVVDISGFSIGSDGHSIQYRNLLAWKYLENGKREFYLLMN
YGKKGRIRFTDGTDIKKSGKWQGLLYGGGKAKVIDLTFDPDDEQLIILPL
AFGTRQGREFIWNDLLSLETGLIKLANGRVIEKTIYNKKIGRDEPALFVA
LTFERREVVDPSNIKPVNLIGVARGENIPAVIALTDPEGCPLPEFKDSSG
GPTDILRIGEGYKEKQRAIQAAKEVEQRRAGGYSRKFASKSRNLADDMVR
NSARDLFYHAVTHDAVLVFANLSRGFGRQGKRTFMTERQYTKMEDWLTAK
LAYEGLTSKTYLSKTLAQYTSKTCSNCGFTITYADMDVMLVRLKKTSDGW
ATTLNNKELKAEYQITYYNRYKRQTVEKELSAELDRLSEESGNNDISKWT
KGRRDEALFLLKKRFSHRPVQEQFVCLDCGHEVHAAEQAALNIARSWLFL
NSNSTEFKSYKSGKQPFVGAWQAFYKRRLKEVWKPNA

[0358] An exemplary CasY ((ncbi.nlm.nih.gov/protein/APG80656.1)>APG80656.1 CRISPR-associated protein CasY [uncultured Parcubacteria group bacterium]) amino acid sequence is as follows:

MSKRHPRISGVKGYRLHAQRLEYTGKSGAMRTIKYPLYSSPSGGRTVPRE
IVSAINDDYVGLYGLSNFDDLYNAEKRNEEKVYSVLDFWYDCVQYGAVFS
YTAPGLLKNVAEVRGGSYELTKTLKGSHLYDELQIDKVIKFLNKKEISRA
NGSLDKLKKDIIDCFKAEYRERHKDQCNKLADDIKNAKKDAGASLGERQK
KLFRDFFGISEQSENDKPSFTNPLNLTCCLLPFDTVNNNRNRGEVLFNKL
KEYAQKLDKNEGSLEMWEYIGIGNSGTAFSNFLGEGFLGRLRENKITELK
KAMMDITDAWRGQEQEEELEKRLRILAALTIKLREPKFDNHWGGYRSDIN
GKLSSWLQNYINQTVKIKEDLKGHKKDLKKAKEMINRFGESDTKEEAVVS
SLLESIEKIVPDDSADDEKPDIPAIAIYRRFLSDGRLTLNRFVQREDVQE
ALIKERLEAEKKKKPKKRKKKSDAEDEKETIDFKELFPHLAKPLKLVPNF
YGDSKRELYKKYKNAAIYTDALWKAVEKIYKSAFSSSLKNSFFDTDFDKD
FFIKRLQKIFSVYRRFNTDKWKPIVKNSFAPYCDIVSLAENEVLYKPKQS
RSRKSAAIDKNRVRLPSTENIAKAGIALARELSVAGFDWKDLLKKEEHEE
YIDLIELHKTALALLLAVTETQLDISALDFVENGTVKDFMKTRDGNLVLE
GRFLEMFSQSIVFSELRGLAGLMSRKEFITRSAIQTMNGKQAELLYIPHE
FQSAKITTPKEMSRAFLDLAPAEFATSLEPESLSEKSLLKLKQMRYYPHY
FGYELTRTGQGIDGGVAENALRLEKSPVKKREIKCKQYKTLGRGQNKIVL
YVRSSYYQTQFLEWFLHRPKNVQTDVAVSGSFLIDEKKVKTRWNYDALTV
ALEPVSGSERVFVSQPFTIFPEKSAEEEGQRYLGIDIGEYGIAYTALEIT
GDSAKILDQNFISDPQLKTLREEVKGLKLDQRRGTFAMPSTKIARIRESL
VHSLRNRIHHLALKHKAKIVYELEVSRFEEGKQKIKKVYATLKKADVYSE
IDADKNLQTTVWGKLAVASEISASYTSQFCGACKKLWRAEMQVDETITTQ
ELIGTVRVIKGGTLIDAIKDFMRPPIFDENDTPFPKYRDFCDKHHISKKM
RGNSCLFICPFCRANADADIQASQTIALLRYVKEEKKVEDYFERFRKLKN
IKVLGQMKKI.

[0359] In some embodiments, the Cas9 is a Neisseria meningitidis Cas9 (NmeCas9) or a variant thereof. NmeCas9 features and PAM sequences as described in Edraki et al. Mol. Cell. (2019) 73(4): 714-726 is incorporated herein by reference in its entirety.

[0360] An exemplary amino acid sequence of a Nme1Cas9 is provided below:

type II CRISPR RNA-guided endonuclease Cas9
[Neisseria meningitidis] WP_002235162.1

| | |
|---|---|
| 1 | maafkpnpin yilgldigia svgwamveid edenpiclid |
| | lgvrvferae vpktgdslam |
| 61 | arrlarsvrr ltrrrahrll rarrllkreg vlqaadfden |
| | glikslpntp wqlraaaldr |
| 121 | kltplewsav llhlikhrgy lsqrkneget adkelgallk |
| | gvadnahalq tgdfrtpael |
| 181 | alnkfekesg hirnqrgdys htfsrkdlqa elillfekqk |
| | efgnphvsgg lkegietllm |
| 241 | tqrpalsgda vqkmlghctf epaepkaakn tytaerfiwl |
| | tklnnlrile qgserpltdt |
| 301 | eratlmdepy rkskltyaqa rkllgledta ffkglrygkd |
| | naeastlmem kayhaisral |
| 361 | ekeglkdkks plnlspelqd eigtafslfk tdeditgrlk |
| | driqpeilea llkhisfdkf |
| 421 | vqislkalrr ivplmeqgkr ydeacaeiyg dhygkkntee |
| | kiylppipad eirnpvvlra |
| 481 | lsgarkving vvrrygspar ihietarevg ksfkdrkeie |
| | krqeenrkdr ekaaakfrey |
| 541 | fpnfvgepks kdilklrlye qqhgkclysg keinlgrlne |
| | kgyveidhal pfsrtwddsf |
| 601 | nnkvlvlgse nqnkgnqtpy eyfngkdnsr ewqefkarve |
| | tsrfprskkq rillqkfded |
| 661 | gfkernlndt ryvnrflcqf vadrmrltgk gkkrvfasng |
| | qitnllrgfw glrkvraend |
| 721 | rhhaldavvv acstvamqqk itrfvrykem nafdgktidk |
| | etgevlhqkt hfpqpweffa |
| 781 | qevmirvfgk pdgkpefeea dtpeklrtll aeklssrpea |
| | vheyvtplfv srapnrkmsg |
| 841 | qghmetvksa krldegvsvl rvpltqlklk dlekmvnrer |
| | epklyealka rleahkddpa |
| 901 | kafaepfyky dkagnrtqqv kavrveqvqk tgvwvrnhng |
| | iadnatmvry dvfekgdkyy |
| 961 | lvpiyswqva kgilpdravv qgkdeedwql iddsfnfkfs |
| | lhpndlvevi tkkarmfgyf |
| 1021 | aschrgtgni nirihdldhk igkngilegi gvktalsfqk |
| | yqidelgkei rperlkkrpp |
| 1081 | vr |

[0361] An exemplary amino acid sequence of a Nme2Cas9 is provided below:

type II CRISPR RNA-guided endonuclease Cas9
[Neisseria meningitidis] WP_002230835.1

| | |
|---|---|
| 1 | maafkpnpin yilgldigia svgwamveid eeenpirlid |
| | lgvrvferae vpktgdslam |
| 61 | arrlarsvrr ltrrrahrll rarrllkreg vlqaadfden |
| | glikslpntp wqlraaaldr |
| 121 | kltplewsav llhlikhrgy lsqrkneget adkelgallk |
| | gvannahalq tgdfrtpael |
| 181 | alnkfekesg hirnqrgdys htfsrkdlqa elillfekqk |
| | efgnphvsgg lkegietllm |
| 241 | tqrpalsgda vqkmlghctf epaepkaakn tytaerfiwl |
| | tklnnlrile qgserpltdt |
| 301 | eratlmdepy rkskltyaqa rkllgledta ffkglrygkd |
| | naeastlmem kayhaisral |
| 361 | ekeglkdkks plnlsselqd eigtafslfk tdeditgrlk |
| | drvqpeilea llkhisfdkf |
| 421 | vqislkalrr ivplmeqgkr ydeacaeiyg dhygkkntee |
| | kiylppipad eirnpvvlra |
| 481 | lsgarkving vvrrygspar ihietarevg ksfkdrkeie |
| | krqeenrkdr ekaaakfrey |
| 541 | fpnfvgepks kdilklrlye qqhgkclysg keinlvrlne |
| | kgyveidhal pfsrtwddsf |
| 601 | nnkvlvlgse nqnkgnqtpy eyfngkdnsr ewqefkarve |
| | tsrfprskkq rillqkfded |
| 661 | gfkecnlndt ryvnrflcqf vadhilltgk gkrrvfasng |
| | gitnllrgfw glrkvraend |
| 721 | rhhaldavvv acstvamqqk itrfvrykem nafdgktidk |
| | etgkvlhqkt hfpqpweffa |
| 781 | qevmirvfgk pdgkpefeea dtpeklrtll aeklssrpea |
| | vheyvtplfv srapnrkmsg |
| 841 | ahkdtlrsak rfvkhnekis vkrvwlteik ladlenmvny |
| | kngreielye alkarleayg |
| 901 | gnakqafdpk dnpfykkggq lvkavrvekt qesgvllnkk |
| | naytiadngd mvrvdvfckv |
| 961 | dkkgknqyfi vpiyawqvae nilpdidckg yriddsytfc |
| | fslhkydlia fqkdekskve |
| 1021 | fayyincdss ngrfylawhd kgskeqqfri stqnlvliqk |
| | yqvnelgkei rperlkkrpp |
| 1081 | vr |

[0362] The Cas9 nuclease has two functional endonuclease domains: RuvC and HNH. Cas9 undergoes a conformational change upon target binding that positions the nuclease domains to cleave opposite strands of the target DNA. The end result of Cas9-mediated DNA cleavage is a double-strand break (DSB) within the target DNA (˜3-4 nucleotides upstream of the PAM sequence). The resulting DSB is then repaired by one of two general repair pathways: (1) the efficient but error-prone non-homologous end joining (NHFJ) pathway; or (2) the less efficient but high-fidelity homology directed repair (HDR) pathway.

[0363] The “efficiency” of non-homologous end joining (NHFJ) and/or homology directed repair (HDR) can be calculated by any convenient method. For example, in some embodiments, efficiency can be expressed in terms of percentage of successful HDR. For example, a surveyor nuclease assay can be used to generate cleavage products and the ratio of products to substrate can be used to calculate the percentage. For example, a surveyor nuclease enzyme can be used that directly cleaves DNA containing a newly integrated restriction sequence as the result of successful HDR. More cleaved substrate indicates a greater percent HDR (a greater efficiency of HDR). As an illustrative example, a fraction (percentage) of HDR can be calculated using the following equation [(cleavage products)/(substrate plus cleavage products)] (e.g., (b+c)(a+b+c), where “a” is the band intensity of DNA substrate and “b” and “c” are the cleavage products).

[0364] In some embodiments, efficiency can be expressed in terms of percentage of successful NHEJ. For example, a T7 endonuclease I assay can be used to generate cleavage products and the ratio of products to substrate can be used to calculate the percentage NHEJ. T7 endonuclease I cleaves mismatched heteroduplex DNA which arises from hybridization of wild-type and mutant DNA strands (NHEJ generates small random insertions or deletions (indels) at the site of the original break). More cleavage indicates a greater percent NHEJ (a greater efficiency of NHEJ). As an illustrative example, a fraction (percentage) of NHEJ can be calculated using the following equation: (1−(1−(b+cy(a+b+c))^{1/2})×100, where “a” is the band intensity of DNA substrate and “b” and “c” are the cleavage products (Ran et. al., Cell. 2013 Sep. 12; 154(6):1380-9; and Ran et al., Nat Protoc. 2013 November; 8(11): 2281-2308).

[0365] The NHEJ repair pathway is the most active repair mechanism, and it frequently causes small nucleotide insertions or deletions (indels) at the DSB site. The randomness of NHEJ-mediated DSB repair has important practical implications, because a population of cells expressing Cas9 and a gRNA or a guide polynucleotide can result in a diverse array of mutations. In most embodiments, NHEJ gives rise to small indels in the target DNA that result in amino acid deletions, insertions, or frameshift mutations leading to premature stop codons within the open reading frame (ORF) of the targeted gene. The ideal end result is a loss-of-function mutation within the targeted gene.

[0366] While NHEJ-mediated DSB repair often disrupts the open reading frame of the gene, homology directed repair (HDR) can be used to generate specific nucleotide changes ranging from a single nucleotide change to large insertions like the addition of a fluorophore or tag. In order to utilize HDR for gene editing, a DNA repair template containing the desired sequence can be delivered into the cell type of interest with the gRNA(s) and Cas9 or Cas9 nickase. The repair template can contain the desired edit as well as additional homologous sequence immediately upstream and downstream of the target (termed left & right homology arms). The length of each homology arm can be dependent on the size of the change being introduced, with larger insertions requiring longer homology arms. The repair template can be a single-stranded oligonucleotide, double-stranded oligonucleotide, or a double-stranded DNA plasmid. The efficiency of HDR is generally low (<10% of modified alleles) even in cells that express Cas9, gRNA and an exogenous repair template. The efficiency of HDR can be enhanced by synchronizing the cells, since HDR takes place during the S and G2 phases of the cell cycle. Chemically or genetically inhibiting genes involved in NHEJ can also increase HDR frequency.

[0367] In some embodiments, Cas9 is a modified Cas9. A given gRNA targeting sequence can have additional sites throughout the genome where partial homology exists. These sites are called off-targets and need to be considered when designing a gRNA. In addition to optimizing gRNA design, CRISPR specificity can also be increased through modifications to Cas9. Cas9 generates double-strand breaks (DSBs) through the combined activity of two nuclease domains, RuvC and HNH. Cas9 nickase, a D10A mutant of SpCas9, retains one nuclease domain and generates a DNA nick rather than a DSB. The nickase system can also be combined with HDR-mediated gene editing for specific gene edits.

[0368] In some embodiments, Cas9 is a variant Cas9 protein. A variant Cas9 polypeptide has an amino acid sequence that is different by one amino acid (e.g., has a deletion, insertion, substitution, fusion) when compared to the amino acid sequence of a wild-type Cas9 protein. In some instances, the variant Cas9 polypeptide has an amino acid change (e.g., deletion, insertion, or substitution) that reduces the nuclease activity of the Cas9 polypeptide. For example, in some instances, the variant Cas9 polypeptide has less than 50%, less than 40%, less than 30%, less than 20%, less than 10%, less than 5%, or less than 1% of the nuclease activity of the corresponding wild-type Cas9 protein. In some embodiments, the variant Cas9 protein has no substantial nuclease activity. When a subject Cas9 protein is a variant Cas9 protein that has no substantial nuclease activity, it can be referred to as “dCas9.”

[0369] In some embodiments, a variant Cas9 protein has reduced nuclease activity. For example, a variant Cas9 protein exhibits less than about 20%, less than about 15%, less than about 10%, less than about 5%, less than about 1%, or less than about 0.1%, of the endonuclease activity of a wild-type Cas9 protein, e.g., a wild-type Cas9 protein.

[0370] In some embodiments, a variant Cas9 protein can cleave the complementary strand of a guide target sequence but has reduced ability to cleave the non-complementary strand of a double stranded guide target sequence. For example, the variant Cas9 protein can have a mutation (amino acid substitution) that reduces the function of the RuvC domain. As a non-limiting example, in some embodiments, a variant Cas9 protein has a D10A (aspartate to alanine at amino acid position 10) and can therefore cleave the complementary strand of a double stranded guide target sequence but has reduced ability to cleave the non-complementary strand of a double stranded guide target sequence (thus resulting in a single strand break (SSB) instead of a double strand break (DSB) when the variant Cas9 protein cleaves a double stranded target nucleic acid) (see, for example, Jinek et al., Science. 2012 Aug. 17; 337(6096):816-21).

[0371] In some embodiments, a variant Cas9 protein can cleave the non-complementary strand of a double stranded guide target sequence but has reduced ability to cleave the complementary strand of the guide target sequence. For example, the variant Cas9 protein can have a mutation (amino acid substitution) that reduces the function of the HNH domain (RuvC/HNH/RuvC domain motifs). As a non-limiting example, in some embodiments, the variant Cas9 protein has an H840A (histidine to alanine at amino acid position 840) mutation and can therefore cleave the non-complementary strand of the guide target sequence but has reduced ability to cleave the complementary strand of the guide target sequence (thus resulting in a SSB instead of a DSB when the variant Cas9 protein cleaves a double stranded guide target sequence). Such a Cas9 protein has a reduced ability to cleave a guide target sequence (e.g., a single stranded guide target sequence) but retains the ability to bind a guide target sequence (e.g., a single stranded guide target sequence).

[0372] In some embodiments, a variant Cas9 protein has a reduced ability to cleave both the complementary and the non-complementary strands of a double stranded target DNA. As a non-limiting example, in some embodiments, the variant Cas9 protein harbors both the D10A and the H840A mutations such that the polypeptide has a reduced ability to cleave both the complementary and the non-complementary strands of a double stranded target DNA. Such a Cas9 protein has a reduced ability to cleave a target DNA (e.g., a single stranded target DNA) but retains the ability to bind a target DNA (e.g., a single stranded target DNA).

[0373] As another non-limiting example, in some embodiments, the variant Cas9 protein harbors W476A and W1126A mutations such that the polypeptide has a reduced ability to cleave a target DNA. Such a Cas9 protein has a reduced ability to cleave a target DNA (e.g., a single stranded target DNA) but retains the ability to bind a target DNA (e.g., a single stranded target DNA).

[0374] As another non-limiting example, in some embodiments, the variant Cas9 protein harbors P475A, W476A, N477A, D1125A, W1126A, and D1127A mutations such that the polypeptide has a reduced ability to cleave a target DNA. Such a Cas9 protein has a reduced ability to cleave a target DNA (e.g., a single stranded target DNA) but retains the ability to bind a target DNA (e.g., a single stranded target DNA).

[0375] As another non-limiting example, in some embodiments, the variant Cas9 protein harbors H840A, W476A, and W1126A, mutations such that the polypeptide has a reduced ability to cleave a target DNA. Such a Cas9 protein has a reduced ability to cleave a target DNA (e.g., a single stranded target DNA) but retains the ability to bind a target DNA (e.g., a single stranded target DNA). As another non-limiting example, in some embodiments, the variant Cas9 protein harbors H840A, D10A, W476A, and W1126A, mutations such that the polypeptide has a reduced ability to cleave a target DNA. Such a Cas9 protein has a reduced ability to cleave a target DNA (e.g., a single stranded target DNA) but retains the ability to bind a target DNA (e.g., a single stranded target DNA). In some embodiments, the variant Cas9 has restored catalytic His residue at position 840 in the Cas9 HNH domain (A840H).

[0376] As another non-limiting example, in some embodiments, the variant Cas9 protein harbors, H840A, P475A, W476A, N477A, D1125A, W1126A, and D1127A mutations such that the polypeptide has a reduced ability to cleave a target DNA. Such a Cas9 protein has a reduced ability to cleave a target DNA (e.g., a single stranded target DNA) but retains the ability to bind a target DNA (e.g., a single stranded target DNA). As another non-limiting example, in some embodiments, the variant Cas9 protein harbors D10A, H840A, P475A, W476A, N477A, D1125A, W1126A, and D1127A mutations such that the polypeptide has a reduced ability to cleave a target DNA. Such a Cas9 protein has a reduced ability to cleave a target DNA (e.g., a single stranded target DNA) but retains the ability to bind a target DNA (e.g., a single stranded target DNA). In some embodiments, when a variant Cas9 protein harbors W476A and W1126A mutations or when the variant Cas9 protein harbors P475A, W476A, N477A, D1125A, W1126A, and D1127A mutations, the variant Cas9 protein does not bind efficiently to a PAM sequence. Thus, in some such embodiments, when such a variant Cas9 protein is used in a method of binding, the method does not require a PAM sequence. In other words, in some embodiments, when such a variant Cas9 protein is used in a method of binding, the method can include a guide RNA, but the method can be performed in the absence of a PAM sequence (and the specificity of binding is therefore provided by the targeting segment of the guide RNA). Other residues can be mutated to achieve the above effects (i.e., inactivate one or the other nuclease portions). As non-limiting examples, residues D10, G12, G17, E762, H840, N854, N863, H982, H983, A984, D986, and/or A987 can be altered (i.e., substituted). Also, mutations other than alanine substitutions are suitable.

[0377] In some embodiments, a variant Cas9 protein that has reduced catalytic activity (e.g., when a Cas9 protein has a D10, G12, G17, E762, H840, N854, N863, H982, H983, A984, D986, and/or a A987 mutation, e.g., D10A, G12A, G17A, E762A, H840A, N854A, N863A, H982A, H983A, A984A, and/or D986A), the variant Cas9 protein can still bind to target DNA in a site-specific manner (because it is still guided to a target DNA sequence by a guide RNA) as long as it retains the ability to interact with the guide RNA.

[0378] In some embodiments, the variant Cas protein can be spCas9, spCas9-VRQR, spCas9-VRER, xCas9 (sp), saCas9, saCas9-KKH, spCas9-MQKSER, spCas9-LRKIQK, or spCas9-LRVSQL.

[0379] In some embodiments, a modified SpCas9 including amino acid substitutions D1135M, S1136Q, G1218K, E1219F, A1322R, D1332A, R1335E, and T1337R (SpCas9-MQKFRAER) and having specificity for the altered PAM 5′-NGC-3′ was used.

[0380] Alternatives to S. pyogenes Cas9 can include RNA-guided endonucleases from the Cpf1 family that display cleavage activity in mammalian cells. CRISPR from Prevotella and Francisella 1 (CRISPR/Cpf1) is a DNA-editing technology analogous to the CRISPR/Cas9 system. Cpf1 is an RNA-guided endonuclease of a class II CRISPR/Cas system. This acquired immune mechanism is found in Prevotella and Francisella bacteria. Cpf1 genes are associated with the CRISPR locus, coding for an endonuclease that use a guide RNA to find and cleave viral DNA. Cpf1 is a smaller and simpler endonuclease than Cas9, overcoming some of the CRISPR/Cas9 system limitations. Unlike Cas9 nucleases, the result of Cpf1-mediated DNA cleavage is a double-strand break with a short 3′ overhang. Cpf1's staggered cleavage pattern can open up the possibility of directional gene transfer, analogous to traditional restriction enzyme cloning, which can increase the efficiency of gene editing. Like the Cas9 variants and orthologues described above, Cpf1 can also expand the number of sites that can be targeted by CRISPR to AT-rich regions or AT-rich genomes that lack the NGG PAM sites favored by SpCas9. The Cpf1 locus contains a mixed alpha/beta domain, a RuvC-I followed by a helical region, a RuvC-II and a zinc finger-like domain. The Cpf1 protein has a RuvC-like endonuclease domain that is similar to the RuvC domain of Cas9. Furthermore, Cpf1 does not have a HNH endonuclease domain, and the N-terminal of Cpf1 does not have the alpha-helical recognition lobe of Cas9. Cpf1 CRISPR-Cas domain architecture shows that Cpf1 is functionally unique, being classified as Class 2, type V CRISPR system. The Cpf1 loci encode Cas1, Cas2 and Cas4 proteins more similar to types I and III than from type II systems. Functional Cpf1 doesn't need the trans-activating CRISPR RNA (tracrRNA), therefore, only CRISPR (crRNA) is required. This benefits genome editing because Cpf1 is not only smaller than Cas9, but also it has a smaller sgRNA molecule (proximately half as many nucleotides as Cas9). The Cpf1-crRNA complex cleaves target DNA or RNA by identification of a protospacer adjacent motif 5′-YTN-3′ in contrast to the G-rich PAM targeted by Cas9. After identification of PAM, Cpf1 introduces a sticky-end-like DNA double-stranded break of 4 or 5 nucleotides overhang.

### Cas12 Domains of Nucleobase Editors

[0381] Typically, microbial CRISPR-Cas systems are divided into Class 1 and Class 2 systems. Class 1 systems have multisubunit effector complexes, while Class 2 systems have a single protein effector. For example, Cas9 and Cpf1 are Class 2 effectors, albeit different types (Type II and Type V, respectively). In addition to Cpf1, Class 2, Type V CRISPR-Cas systems also comprise Cas12a/Cpf1, Cas12b/C2c1, Cas12c/C2c3, Cas12d/CasY, Cas12e/CasX, Cas12g, Cas12h, and Cas12i). See, e.g., Shmakov et al., “Discovery and Functional Characterization of Diverse Class 2 CRISPR Cas Systems,” Mol. Cell, 2015 Nov. 5; 60(3): 385-397; Makarova et al., “Classification and Nomenclature of CRISPR-Cas Systems: Where from Here?” CRISPR Journal, 2018, 1(5): 325-336; and Yan et al., “Functionally Diverse Type V CRISPR-Cas Systems,” Science, 2019 Jan. 4; 363: 88-91; the entire contents of each is hereby incorporated by reference. Type V Cas proteins contain a RuvC (or RuvC-like) endonuclease domain. While production of mature CRISPR RNA (crRNA) is generally tracrRNA-independent, Cas12b/C2c1, for example, requires tracrRNA for production of crRNA. Cas12b/C2c1 depends on both crRNA and tracrRNA for DNA cleavage.

[0382] Nucleic acid programmable DNA binding proteins contemplated in the present invention include Cas proteins that are classified as Class 2, Type V (Cas12 proteins). Non-limiting examples of Cas Class 2, Type V proteins include Cas12a/Cpf1, Cas12b/C2cl, Cas12c/C2c3, Cas12d/CasY, Cas12e/CasX, Cas12g, Cas12h, and Cas12i, homologues thereof, or modified versions thereof. As used herein, a Cas12 protein can also be referred to as a Cas12 nuclease, a Cas12 domain, or a Cas12 protein domain. In some embodiments, the Cas12 proteins of the present invention comprise an amino acid sequence interrupted by an internally fused protein domain such as a deaminase domain.

[0383] In some embodiments, the Cas12 domain is a nuclease inactive Cas12 domain or a Cas12 nickase. In some embodiments, the Cas12 domain is a nuclease active domain. For example, the Cas12 domain may be a Cas12 domain that nicks one strand of a duplexed nucleic acid (e.g., duplexed DNA molecule). In some embodiments, the Cas12 domain comprises any one of the amino acid sequences as set forth herein. In some embodiments the Cas12 domain comprises an amino acid sequence that is at least 60%, at least 65%, at least 70%, at least 75%, at least 80%, at least 85%, at least 90%, at least 95%, at least 96%, at least 97%, at least 98%, at least 99%, or at least 99.5% identical to any one of the amino acid sequences set forth herein. In some embodiments, the Cas12 domain comprises an amino acid sequence that has 1, 2, 3, 4, 5, 6, 7, 8, 9, 10, 11, 12, 13, 14, 15, 16, 17, 18, 19, 20, 21, 22, 21, 24, 25, 26, 27, 28, 29, 30, 31, 32, 33, 34, 35, 36, 37, 38, 39, 40, 41, 42, 43, 44, 45, 46, 47, 48, 49, 50 or more mutations compared to any one of the amino acid sequences set forth herein. In some embodiments, the Cas12 domain comprises an amino acid sequence that has at least 10, at least 15, at least 20, at least 30, at least 40, at least 50, at least 60, at least 70, at least 80, at least 90, at least 100, at least 150, at least 200, at least 250, at least 300, at least 350, at least 400, at least 500, at least 600, at least 700, at least 800, at least 900, at least 1000, at least 1100, or at least 1200 identical contiguous amino acid residues as compared to any one of the amino acid sequences set forth herein.

[0384] In some embodiments, proteins comprising fragments of Cas12 are provided. For example, in some embodiments, a protein comprises one of two Cas12 domains: (1) the gRNA binding domain of Cas12; or (2) the DNA cleavage domain of Cas12. In some embodiments, proteins comprising Cas12 or fragments thereof are referred to as “Cas12 variants.” A Cas12 variant shares homology to Cas12, or a fragment thereof. For example, a Cas12 variant is at least about 70% identical, at least about 80% identical, at least about 90% identical, at least about 95% identical, at least about 96% identical, at least about 97% identical, at least about 98% identical, at least about 99% identical, at least about 99.5% identical, or at least about 99.9% identical to wild type Cas12. In some embodiments, the Cas12 variant may have 1, 2, 3, 4, 5, 6, 7, 8, 9, 10, 11, 12, 13, 14, 15, 16, 17, 18, 19, 20, 21, 22, 21, 24, 25, 26, 27, 28, 29, 30, 31, 32, 33, 34, 35, 36, 37, 38, 39, 40, 41, 42, 43, 44, 45, 46, 47, 48, 49, 50 or more amino acid changes compared to wild type Cas12. In some embodiments, the Cas12 variant comprises a fragment of Cas12 (e.g., a gRNA binding domain or a DNA cleavage domain), such that the fragment is at least about 70% identical, at least about 80% identical, at least about 90% identical, at least about 95% identical, at least about 96% identical, at least about 97% identical, at least about 98% identical, at least about 99% identical, at least about 99.5% identical, or at least about 99.9% identical to the corresponding fragment of wild type Cas12. In some embodiments, the fragment is at least 30%, at least 35%, at least 40%, at least 45%, at least 50%, at least 55%, at least 60%, at least 65%, at least 70%, at least 75%, at least 80%, at least 85%, at least 90%, at least 95% identical, at least 96%, at least 97%, at least 98%, at least 99%, or at least 99.5% of the amino acid length of a corresponding wild type Cas12. In some embodiments, the fragment is at least 100 amino acids in length. In some embodiments, the fragment is at least 100, 150, 200, 250, 300, 350, 400, 450, 500, 550, 600, 650, 700, 750, 800, 850, 900, 950, 1000, 1050, 1100, 1150, 1200, 1250, or at least 1300 amino acids in length.

[0385] In some embodiments, Cas12 corresponds to, or comprises in part or in whole, a Cas12 amino acid sequence having one or more mutations that alter the Cas12 nuclease activity. Such mutations, by way of example, include amino acid substitutions within the RuvC nuclease domain of Cas12. In some embodiments, variants or homologues of Cas12 are provided which are at least about 70% identical, at least about 80% identical, at least about 90% identical, at least about 95% identical, at least about 98% identical, at least about 99% identical, at least about 99.5% identical, or at least about 99.9% identical to a wild type Cas12. In some embodiments, variants of Cas12 are provided having amino acid sequences which are shorter, or longer, by about 5 amino acids, by about 10 amino acids, by about 15 amino acids, by about 20 amino acids, by about 25 amino acids, by about 30 amino acids, by about 40 amino acids, by about 50 amino acids, by about 75 amino acids, by about 100 amino acids or more.

[0386] In some embodiments, Cas12 fusion proteins as provided herein comprise the full-length amino acid sequence of a Cas12 protein, e.g., one of the Cas12 sequences provided herein. In other embodiments, however, fusion proteins as provided herein do not comprise a full-length Cas12 sequence, but only one or more fragments thereof. Exemplary amino acid sequences of suitable Cas12 domains are provided herein, and additional suitable sequences of Cas12 domains and fragments will be apparent to those of skill in the art.

[0387] Generally, the class 2, Type V Cas proteins have a single functional RuvC endonuclease domain (See, e.g., Chen et al., “CRISPR-Cas12a target binding unleashes indiscriminate single-stranded DNase activity,” Science 360:436-439 (2018)). In some cases, the Cas12 protein is a variant Cas12b protein. (See Strecker et al., Nature Communications, 2019, 10(1): Art. No.: 212). In one embodiment, a variant Cas12 polypeptide has an amino acid sequence that is different by 1, 2, 3, 4, 5 or more amino acids (e.g., has a deletion, insertion, substitution, fusion) when compared to the amino acid sequence of a wild type Cas12 protein. In some instances, the variant Cas12 polypeptide has an amino acid change (e.g., deletion, insertion, or substitution) that reduces the activity of the Cas12 polypeptide. For example, in some instances, the variant Cas12 is a Cas12b polypeptide that has less than 50%, less than 40%, less than 30%, less than 20%, less than 10%, less than 5%, or less than 1% of the nickase activity of the corresponding wild-type Cas12b protein. In some cases, the variant Cas12b protein has no substantial nickase activity.

[0388] In some cases, a variant Cas12b protein has reduced nickase activity. For example, a variant Cas12b protein exhibits less than about 20%, less than about 15%, less than about 10%, less than about 5%, less than about 1%, or less than about 0.1%, of the nickase activity of a wild-type Cas12b protein.

[0389] In some embodiments, the Cas12 protein includes RNA-guided endonucleases from the Cas12a/Cpf1 family that displays activity in mammalian cells. CRISPR from Prevotella and Francisella 1 (CRISPR/Cpf1) is a DNA editing technology analogous to the CRISPR/Cas9 system. Cpf1 is an RNA-guided endonuclease of a class II CRISPR/Cas system. This acquired immune mechanism is found in Prevotella and Francisella bacteria. Cpf1 genes are associated with the CRISPR locus, coding for an endonuclease that use a guide RNA to find and cleave viral DNA. Cpf1 is a smaller and simpler endonuclease than Cas9, overcoming some of the CRISPR/Cas9 system limitations. Unlike Cas9 nucleases, the result of Cpf1-mediated DNA cleavage is a double-strand break with a short 3′ overhang. Cpf1's staggered cleavage pattern can open up the possibility of directional gene transfer, analogous to traditional restriction enzyme cloning, which can increase the efficiency of gene editing. Like the Cas9 variants and orthologues described above, Cpf1 can also expand the number of sites that can be targeted by CRISPR to AT-rich regions or AT-rich genomes that lack the NGG PAM sites favored by SpCas9. The Cpf1 locus contains a mixed alpha/beta domain, a RuvC-I followed by a helical region, a RuvC-II and a zinc finger-like domain. The Cpf1 protein has a RuvC-like endonuclease domain that is similar to the RuvC domain of Cas9. Furthermore, Cpf1, unlike Cas9, does not have a HNH endonuclease domain, and the N-terminal of Cpf1 does not have the alpha-helical recognition lobe of Cas9. Cpf1 CRISPR-Cas domain architecture shows that Cpf1 is functionally unique, being classified as Class 2, type V CRISPR system. The Cpf1 loci encode Cas1, Cas2, and Cas4 proteins are more similar to types I and III than type II systems. Functional Cpf1 does not require the trans-activating CRISPR RNA (tracrRNA), therefore, only CRISPR (crRNA) is required. This benefits genome editing because Cpf1 is not only smaller than Cas9, but also it has a smaller sgRNA molecule (approximately half as many nucleotides as Cas9). The Cpf1-crRNA complex cleaves target DNA or RNA by identification of a protospacer adjacent motif 5′-YTN-3′ or 5′-TTTN-3′ in contrast to the G-rich PAM targeted by Cas9. After identification of PAM, Cpf1 introduces a sticky-end-like DNA double-stranded break having an overhang of 4 or 5 nucleotides.

[0390] In some aspects of the present invention, a vector encodes a CRISPR enzyme that is mutated to with respect to a corresponding wild-type enzyme such that the mutated CRISPR enzyme lacks the ability to cleave one or both strands of a target polynucleotide containing a target sequence can be used. Cas12 can refer to a polypeptide with at least or at least about 50%, 60%, 70%, 80%, 90%, 91%, 92%, 93%, 94%, 95%, 96%, 97%, 98%, 99%, or 100% sequence identity and/or sequence homology to a wild type exemplary Cas12 polypeptide (e.g., Cas12 from Bacillus hisashii). Cas12 can refer to a polypeptide with at most or at most about 50%, 60%, 70%, 80%, 90%, 91%, 92%, 93%, 94%, 95%, 96%, 97%, 98%, 99%, or 100% sequence identity and/or sequence homology to a wild type exemplary Cas12 polypeptide (e.g., from Bacillus hisashii (BhCas12b), Bacillus sp. V3-13 (BvCas12b), and Alicyclobacillus acidiphilus (AaCas12b)). Cas12 can refer to the wild type or a modified form of the Cas12 protein that can comprise an amino acid change such as a deletion, insertion, substitution, variant, mutation, fusion, chimera, or any combination thereof.

### Nucleic Acid Programmable DNA Binding Proteins

[0391] Some aspects of the disclosure provide fusion proteins comprising domains that act as nucleic acid programmable DNA binding proteins, which may be used to guide a protein, such as a base editor, to a specific nucleic acid (e.g., DNA or RNA) sequence. In particular embodiments, a fusion protein comprises a nucleic acid programmable DNA binding protein domain and a deaminase domain. Non-limiting examples of nucleic acid programmable DNA binding proteins include, Cas9 (e.g., dCas9 and nCas9), Cas12a/Cpf1, Cas12b/C2cl, Cas12c/C2c3, Cas12d/CasY, Cas12e/CasX, Cas12g, Cas12h, and Cas12i. Non-limiting examples of Cas enzymes include Cas1, Cas1B, Cas2, Cas3, Cas4, Cas5, Cas5d, Cas5t, Cas5h, Cas5a, Cas6, Cas7, Cas8, Cas8a, Cas8b, Cas8c, Cas9 (also known as Csn1 or Csx12), Cas10, Cas10d, Cas12a/Cpf1, Cas12b/C2cl, Cas12c/C2c3, Cas12d/CasY, Cas12e/CasX, Cas12g, Cas12h, Cas12i, Csy1, Csy2, Csy3, Csy4, Cse1, Cse2, Cse3, Cse4, Cse5e, Csc1, Csc2, Csa5, Csn1, Csn2, Csm1, Csm2, Csm3, Csm4, Csm5, Csm6, Cmr1, Cmr3, Cmr4, Cmr5, Cmr6, Csb1, Csb2, Csb3, Csx17, Csx14, Csx10, Csx16, CsaX, Csx3, Csx1, Csx1S, Csx11, Csf1, Csf2, CsO, Csf4, Csd1, Csd2, Cst1, Cst2, Csh1, Csh2, Csa1, Csa2, Csa3, Csa4, Csa5, Type II Cas effector proteins, Type V Cas effector proteins, Type VI Cas effector proteins, CARF, DinG, homologues thereof, or modified or engineered versions thereof. Other nucleic acid programmable DNA binding proteins are also within the scope of this disclosure, although they may not be specifically listed in this disclosure. See, e.g., Makarova et al. “Classification and Nomenclature of CRISPR-Cas Systems: Where from Here?” CRISPR J. 2018 October; 1:325-336. doi: 10.1089/crispr.2018.0033; Yan et al., “Functionally diverse type V CRISPR-Cas systems” Science. 2019 Jan. 4; 363(6422):88-91. doi: 10.1126/science.aav7271, the entire contents of each are hereby incorporated by reference.

[0392] One example of a nucleic acid programmable DNA-binding protein that has different PAM specificity than Cas9 is Clustered Regularly Interspaced Short Palindromic Repeats from Prevotella and Francisella 1 (Cpf1). Similar to Cas9, Cpf1 is also a class 2 CRISPR effector. It has been shown that Cpf1 mediates robust DNA interference with features distinct from Cas9. Cpf1 is a single RNA-guided endonuclease lacking tracrRNA, and it utilizes a T-rich protospacer-adjacent motif (TTN, TTTN, or YTN). Moreover, Cpf1 cleaves DNA via a staggered DNA double-stranded break. Out of 16 Cpf1-family proteins, two enzymes from Acidaminococcus and Lachnospiraceae are shown to have efficient genome-editing activity in human cells. Cpf1 proteins are known in the art and have been described previously, for example Yamano et al., “Crystal structure of Cpf1 in complex with guide RNA and target DNA.” Cell (165) 2016, p. 949-962; the entire contents of which is hereby incorporated by reference.

[0393] Useful in the present compositions and methods are nuclease-inactive Cpf1 (dCpf1) variants that may be used as a guide nucleotide sequence-programmable DNA-binding protein domain. The Cpf1 protein has a RuvC-like endonuclease domain that is similar to the RuvC domain of Cas9 but does not have a HNH endonuclease domain, and the N-terminal of Cpf1 does not have the alfa-helical recognition lobe of Cas9. It was shown in Zetsche et al., Cell, 163, 759-771, 2015 (which is incorporated herein by reference) that, the RuvC-like domain of Cpf1 is responsible for cleaving both DNA strands and inactivation of the RuvC-like domain inactivates Cpf1 nuclease activity. For example, mutations corresponding to D917A, E1006A, or D1255A in Francisella novicida Cpf1 inactivate Cpf1 nuclease activity. In some embodiments, the dCpf1 of the present disclosure comprises mutations corresponding to D917A, E1006A, D1255A, D917A/E1006A, D917A/D1255A, E1006A/D1255A, or D917A/E1006A/D1255A. It is to be understood that any mutations, e.g., substitution mutations, deletions, or insertions that inactivate the RuvC domain of Cpf1, may be used in accordance with the present disclosure.

[0394] In some embodiments, the nucleic acid programmable DNA binding protein (napDNAbp) of any of the fusion proteins provided herein may be a Cpf1 protein. In some embodiments, the Cpf1 protein is a Cpf1 nickase (nCpf1). In some embodiments, the Cpf1 protein is a nuclease inactive Cpf1 (dCpf1). In some embodiments, the Cpf1, the nCpf1, or the dCpf1 comprises an amino acid sequence that is at least 85%, at least 90%, at least 91%, at least 92%, at least 93%, at least 94%, at least 95%, at least 96%, at least 97%, at least 98%, at least 99%, or at least 99.5% identical to a Cpf1 sequence disclosed herein. In some embodiments, the dCpf1 comprises an amino acid sequence that is at least 85%, at least 90%, at least 91%, at least 92%, at least 93%, at least 94%, at least 95%, at least 96%, at least 97%, at least 98%, at least 99%, or at ease 99.5% identical to a Cpf1 sequence disclosed herein, and comprises mutations corresponding to D917A, E1006A, D1255A, D917A/E1006A, D917A/D1255A, E1006A/D1255A, or D917A/E1006A/D1255A. It should be appreciated that Cpf1 from other bacterial species may also be used in accordance with the present disclosure.

Wild-type Francisella novicida Cpf1 (D917, E1006, and D1255 are bolded
and underlined)
MSIYQEFVNKYSLSKTLRFELIPQGKTLENIKARGLILDDEKRAKDYKKAKQIIDKYHQFFI
EEILSSVCISEDLLQNYSDVYFKLKKSDDDNLQKDFKSAKDTIKKQISEYIKDSEKFKNLFN
QNLIDAKKGQESDLILWLKQSKDNGIELFKANSDITDIDEALEIIKSFKGWTTYFKGFHENR
KNVYSSNDIPTSIIYRIVDDNLPKFLENKAKYESLKDKAPEAINYEQIKKDLAEELTFDIDY
KTSEVNQRVFSLDEVFEIANFNNYLNQSGITKFNTIIGGKFVNGENTKRKGINEYINLYSQQ
INDKTLKKYKMSVLFKQILSDTESKSFVIDKLEDDSDVVTTMQSFYEQIAAFKTVEEKSIKE
TLSLLFDDLKAQKLDLSKIYFKNDKSLTDLSQQVFDDYSVIGTAVLEYITQQIAPKNLDNPS
KKEQELIAKKTEKAKYLSLETIKLALEEFNKHRDIDKQCRFEEILANFAAIPMIFDEIAQNK
DNLAQISIKYQNQGKKDLLQASAEDDVKAIKDLLDQTNNLLHKLKIFHISQSEDKANILDKD
EHFYLVFEECYFELANIVPLYNKIRNYITQKPYSDEKFKLNFENSTLANGWDKNKEPDNTAI
LFIKDDKYYLGVMNKKNNKIFDDKAIKENKGEGYKKIVYKLLPGANKMLPKVFFSAKSIKFY
NPSEDILRIRNHSTHTKNGSPQKGYEKFEFNIEDCRKFIDFYKQSISKHPEWKDFGFRFSDT
QRYNSIDEFYREVENQGYKLTFENISESYIDSVVNQGKLYLFQIYNKDFSAYSKGRPNLHTL
YWKALFDERNLQDVVYKLNGEAELFYRKQSIPKKITHPAKEAIANKNKDNPKKESVFEYDLI
KDKRFTEDKFFFHCPITINFKSSGANKFNDEINLLLKEKANDVHILSIDRGERHLAYYTLVD
GKGNIIKQDTFNIIGNDRMKTNYHDKLAAIEKDRDSARKDWKKINNIKEMKEGYLSQVVHEI
AKLVIEYNAIVVFEDLNFGFKRGRFKVEKQVYQKLEKMLIEKLNYLVFKDNEFDKTGGVLRA
YQLTAPFETFKKMGKQTGIIYYVPAGFTSKICPVTGFVNQLYPKYESVSKSQEFFSKFDKIC
YNLDKGYFEFSFDYKNFGDKAAKGKWTIASFGSRLINFRNSDKNHNWDTREVYPTKELEKLL
KDYSIEYGHGECIKAAICGESDKKFFAKLTSVLNTILQMRNSKTGTELDYLISPVADVNGNF
FDSRQAPKNMPQDADANGAYHIGLKGLMLLGRIKNNQEGKKLNLVIKNEEYFEFVQNRNN
Francisella novicida Cpf1 D917A (A917, E1006, and D1255 are bolded
and underlined)
MSIYQEFVNKYSLSKTLRFELIPQGKTLENIKARGLILDDEKRAKDYKKAKQIIDKYHQFFI
EEILSSVCISEDLLQNYSDVYFKLKKSDDDNLQKDFKSAKDTIKKQISEYIKDSEKFKNLFN
QNLIDAKKGQESDLILWLKQSKDNGIELFKANSDITDIDEALEIIKSFKGWTTYFKGFHENR
KNVYSSNDIPTSIIYRIVDDNLPKFLENKAKYESLKDKAPEAINYEQIKKDLAEELTFDIDY
KTSEVNQRVFSLDEVFEIANFNNYLNQSGITKFNTIIGGKFVNGENTKRKGINEYINLYSQQ
INDKTLKKYKMSVLFKQILSDTESKSFVIDKLEDDSDVVTTMQSFYEQIAAFKTVEEKSIKE
TLSLLFDDLKAQKLDLSKIYFKNDKSLTDLSQQVFDDYSVIGTAVLEYITQQIAPKNLDNPS
KKEQELIAKKTEKAKYLSLETIKLALEEFNKHRDIDKQCRFEEILANFAAIPMIFDEIAQNK
DNLAQISIKYQNQGKKDLLQASAEDDVKAIKDLLDQTNNLLHKLKIFHISQSEDKANILDKD
EHFYLVFEECYFELANIVPLYNKIRNYITQKPYSDEKFKLNFENSTLANGWDKNKEPDNTAI
LFIKDDKYYLGVMNKKNNKIFDDKAIKENKGEGYKKIVYKLLPGANKMLPKVFFSAKSIKFY
NPSEDILRIRNHSTHTKNGSPQKGYEKFEFNIEDCRKFIDFYKQSISKHPEWKDFGFRFSDT
QRYNSIDEFYREVENQGYKLTFENISESYIDSVVNQGKLYLFQIYNKDFSAYSKGRPNLHTL
YWKALFDERNLQDVVYKLNGEAELFYRKQSIPKKITHPAKEAIANKNKDNPKKESVFEYDLI
KDKRFTEDKFFFHCPITINFKSSGANKFNDEINLLLKEKANDVHILSIARGERHLAYYTLVD
GKGNIIKQDTFNIIGNDRMKTNYHDKLAAIEKDRDSARKDWKKINNIKEMKEGYLSQVVHEI
AKLVIEYNAIVVFEDLNFGFKRGRFKVEKQVYQKLEKMLIEKLNYLVFKDNEFDKTGGVLRA
YQLTAPFETFKKMGKQTGIIYYVPAGFTSKICPVTGFVNQLYPKYESVSKSQEFFSKFDKIC
YNLDKGYFEFSFDYKNFGDKAAKGKWTIASFGSRLINFRNSDKNHNWDTREVYPTKELEKLL
KDYSIEYGHGECIKAAICGESDKKFFAKLTSVLNTILQMRNSKTGTELDYLISPVADVNGNF
FDSRQAPKNMPQDADANGAYHIGLKGLMLLGRIKNNQEGKKLNLVIKNEEYFEFVQNRNN
Francisella novicida Cpf1 E1006A (D917, A1006, and D1255 are bolded
and underlined)
MSIYQEFVNKYSLSKTLRFELIPQGKTLENIKARGLILDDEKRAKDYKKAKQIIDKYHQFFI
EEILSSVCISEDLLQNYSDVYFKLKKSDDDNLQKDFKSAKDTIKKQISEYIKDSEKFKNLFN
QNLIDAKKGQESDLILWLKQSKDNGIELFKANSDITDIDEALEIIKSFKGWTTYFKGFHENR
KNVYSSNDIPTSIIYRIVDDNLPKFLENKAKYESLKDKAPEAINYEQIKKDLAEELTFDIDY
KTSEVNQRVFSLDEVFEIANFNNYLNQSGITKFNTIIGGKFVNGENTKRKGINEYINLYSQQ
INDKTLKKYKMSVLFKQILSDTESKSFVIDKLEDDSDVVTTMQSFYEQIAAFKTVEEKSIKE
TLSLLFDDLKAQKLDLSKIYFKNDKSLTDLSQQVFDDYSVIGTAVLEYITQQIAPKNLDNPS
KKEQELIAKKTEKAKYLSLETIKLALEEFNKHRDIDKQCRFEEILANFAAIPMIFDEIAQNK
DNLAQISIKYQNQGKKDLLQASAEDDVKAIKDLLDQTNNLLHKLKIFHISQSEDKANILDKD
EHFYLVFEECYFELANIVPLYNKIRNYITQKPYSDEKFKLNFENSTLANGWDKNKEPDNTAI
LFIKDDKYYLGVMNKKNNKIFDDKAIKENKGEGYKKIVYKLLPGANKMLPKVFFSAKSIKFY
NPSEDILRIRNHSTHTKNGSPQKGYEKFEFNIEDCRKFIDFYKQSISKHPEWKDFGFRFSDT
QRYNSIDEFYREVENQGYKLTFENISESYIDSVVNQGKLYLFQIYNKDFSAYSKGRPNLHTL
YWKALFDERNLQDVVYKLNGEAELFYRKQSIPKKITHPAKEAIANKNKDNPKKESVFEYDLI
KDKRFTEDKFFFHCPITINFKSSGANKFNDEINLLLKEKANDVHILSIDRGERHLAYYTLVD
GKGNIIKQDTFNIIGNDRMKTNYHDKLAAIEKDRDSARKDWKKINNIKEMKEGYLSQVVHEI
AKLVIEYNAIVVFADLNFGFKRGRFKVEKQVYQKLEKMLIEKLNYLVFKDNEFDKTGGVLRA
YQLTAPFETFKKMGKQTGIIYYVPAGFTSKICPVTGFVNQLYPKYESVSKSQEFFSKFDKIC
YNLDKGYFEFSFDYKNFGDKAAKGKWTIASFGSRLINFRNSDKNHNWDTREVYPTKELEKLL
KDYSIEYGHGECIKAAICGESDKKFFAKLTSVLNTILQMRNSKTGTELDYLISPVADVNGNF
FDSRQAPKNMPQDADANGAYHIGLKGLMLLGRIKNNQEGKKLNLVIKNEEYFEFVQNRNN
Francisella novicida Cpf1 D1255A (D917, E1006, and A1255 are bolded
and underlined)
MSIYQEFVNKYSLSKTLRFELIPQGKTLENIKARGLILDDEKRAKDYKKAKQIIDKYHQFFI
EEILSSVCISEDLLQNYSDVYFKLKKSDDDNLQKDFKSAKDTIKKQISEYIKDSEKFKNLFN
QNLIDAKKGQESDLILWLKQSKDNGIELFKANSDITDIDEALEIIKSFKGWTTYFKGFHENR
KNVYSSNDIPTSIIYRIVDDNLPKFLENKAKYESLKDKAPEAINYEQIKKDLAEELTFDIDY
KTSEVNQRVFSLDEVFEIANFNNYLNQSGITKFNTIIGGKFVNGENTKRKGINEYINLYSQQ
INDKTLKKYKMSVLFKQILSDTESKSFVIDKLEDDSDVVTTMQSFYEQIAAFKTVEEKSIKE
TLSLLFDDLKAQKLDLSKIYFKNDKSLTDLSQQVFDDYSVIGTAVLEYITQQIAPKNLDNPS
KKEQELIAKKTEKAKYLSLETIKLALEEFNKHRDIDKQCRFEEILANFAAIPMIFDEIAQNK
DNLAQISIKYQNQGKKDLLQASAEDDVKAIKDLLDQTNNLLHKLKIFHISQSEDKANILDKD
EHFYLVFEECYFELANIVPLYNKIRNYITQKPYSDEKFKLNFENSTLANGWDKNKEPDNTAI
LFIKDDKYYLGVMNKKNNKIFDDKAIKENKGEGYKKIVYKLLPGANKMLPKVFFSAKSIKFY
NPSEDILRIRNHSTHTKNGSPQKGYEKFEFNIEDCRKFIDFYKQSISKHPEWKDFGFRFSDT
QRYNSIDEFYREVENQGYKLTFENISESYIDSVVNQGKLYLFQIYNKDFSAYSKGRPNLHTL
YWKALFDERNLQDVVYKLNGEAELFYRKQSIPKKITHPAKEAIANKNKDNPKKESVFEYDLI
KDKRFTEDKFFFHCPITINFKSSGANKFNDEINLLLKEKANDVHILSIDRGERHLAYYTLVD
GKGNIIKQDTFNIIGNDRMKTNYHDKLAAIEKDRDSARKDWKKINNIKEMKEGYLSQVVHEI
AKLVIEYNAIVVFEDLNFGFKRGRFKVEKQVYQKLEKMLIEKLNYLVFKDNEFDKTGGVLRA
YQLTAPFETFKKMGKQTGIIYYVPAGFTSKICPVTGFVNQLYPKYESVSKSQEFFSKFDKIC
YNLDKGYFEFSFDYKNFGDKAAKGKWTIASFGSRLINFRNSDKNHNWDTREVYPTKELEKLL
KDYSIEYGHGECIKAAICGESDKKFFAKLTSVLNTILQMRNSKTGTELDYLISPVADVNGNF
FDSRQAPKNMPQDAAANGAYHIGLKGLMLLGRIKNNQEGKKLNLVIKNEEYFEFVQNRNN
Francisella novicida Cpf1 D917A/E1006A (A917, A1006, and D1255 are bolded
and underlined)
MSIYQEFVNKYSLSKTLRFELIPQGKTLENIKARGLILDDEKRAKDYKKAKQIIDKYHQFFI
EEILSSVCISEDLLQNYSDVYFKLKKSDDDNLQKDFKSAKDTIKKQISEYIKDSEKFKNLFN
QNLIDAKKGQESDLILWLKQSKDNGIELFKANSDITDIDEALEIIKSFKGWTTYFKGFHENR
KNVYSSNDIPTSIIYRIVDDNLPKFLENKAKYESLKDKAPEAINYEQIKKDLAEELTFDIDY
KTSEVNQRVFSLDEVFEIANFNNYLNQSGITKFNTIIGGKFVNGENTKRKGINEYINLYSQQ
INDKTLKKYKMSVLFKQILSDTESKSFVIDKLEDDSDVVTTMQSFYEQIAAFKTVEEKSIKE
TLSLLFDDLKAQKLDLSKIYFKNDKSLTDLSQQVFDDYSVIGTAVLEYITQQIAPKNLDNPS
KKEQELIAKKTEKAKYLSLETIKLALEEFNKHRDIDKQCRFEEILANFAAIPMIFDEIAQNK
DNLAQISIKYQNQGKKDLLQASAEDDVKAIKDLLDQTNNLLHKLKIFHISQSEDKANILDKD
EHFYLVFEECYFELANIVPLYNKIRNYITQKPYSDEKFKLNFENSTLANGWDKNKEPDNTAI
LFIKDDKYYLGVMNKKNNKIFDDKAIKENKGEGYKKIVYKLLPGANKMLPKVFFSAKSIKFY
NPSEDILRIRNHSTHTKNGSPQKGYEKFEFNIEDCRKFIDFYKQSISKHPEWKDFGFRFSDT
QRYNSIDEFYREVENQGYKLTFENISESYIDSVVNQGKLYLFQIYNKDFSAYSKGRPNLHTL
YWKALFDERNLQDVVYKLNGEAELFYRKQSIPKKITHPAKEAIANKNKDNPKKESVFEYDLI
KDKRFTEDKFFFHCPITINFKSSGANKFNDEINLLLKEKANDVHILSIARGERHLAYYTLVD
GKGNIIKQDTFNIIGNDRMKTNYHDKLAAIEKDRDSARKDWKKINNIKEMKEGYLSQVVHEI
AKLVIEYNAIVVFADLNFGFKRGRFKVEKQVYQKLEKMLIEKLNYLVFKDNEFDKTGGVLRA
YQLTAPFETFKKMGKQTGIIYYVPAGFTSKICPVTGFVNQLYPKYESVSKSQEFFSKFDKIC
YNLDKGYFEFSFDYKNFGDKAAKGKWTIASFGSRLINFRNSDKNHNWDTREVYPTKELEKLL
KDYSIEYGHGECIKAAICGESDKKFFAKLTSVLNTILQMRNSKTGTELDYLISPVADVNGNF
FDSRQAPKNMPQDADANGAYHIGLKGLMLLGRIKNNQEGKKLNLVIKNEEYFEFVQNRNN
Francisella novicida Cpf1 D917A/D1255A (A917, E1006, and A1255 are bolded
and underlined)
MSIYQEFVNKYSLSKTLRFELIPQGKTLENIKARGLILDDEKRAKDYKKAKQIIDKYHQFFI
EEILSSVCISEDLLQNYSDVYFKLKKSDDDNLQKDFKSAKDTIKKQISEYIKDSEKFKNLFN
QNLIDAKKGQESDLILWLKQSKDNGIELFKANSDITDIDEALEIIKSFKGWTTYFKGFHENR
KNVYSSNDIPTSIIYRIVDDNLPKFLENKAKYESLKDKAPEAINYEQIKKDLAEELTFDIDY
KTSEVNQRVFSLDEVFEIANFNNYLNQSGITKFNTIIGGKFVNGENTKRKGINEYINLYSQQ
INDKTLKKYKMSVLFKQILSDTESKSFVIDKLEDDSDVVTTMQSFYEQIAAFKTVEEKSIKE
TLSLLFDDLKAQKLDLSKIYFKNDKSLTDLSQQVFDDYSVIGTAVLEYITQQIAPKNLDNPS
KKEQELIAKKTEKAKYLSLETIKLALEEFNKHRDIDKQCRFEEILANFAAIPMIFDEIAQNK
DNLAQISIKYQNQGKKDLLQASAEDDVKAIKDLLDQTNNLLHKLKIFHISQSEDKANILDKD
EHFYLVFEECYFELANIVPLYNKIRNYITQKPYSDEKFKLNFENSTLANGWDKNKEPDNTAI
LFIKDDKYYLGVMNKKNNKIFDDKAIKENKGEGYKKIVYKLLPGANKMLPKVFFSAKSIKFY
NPSEDILRIRNHSTHTKNGSPQKGYEKFEFNIEDCRKFIDFYKQSISKHPEWKDFGFRFSDT
QRYNSIDEFYREVENQGYKLTFENISESYIDSVVNQGKLYLFQIYNKDFSAYSKGRPNLHTL
YWKALFDERNLQDVVYKLNGEAELFYRKQSIPKKITHPAKEAIANKNKDNPKKESVFEYDLI
KDKRFTEDKFFFHCPITINFKSSGANKFNDEINLLLKEKANDVHILSIARGERHLAYYTLVD
GKGNIIKQDTFNIIGNDRMKTNYHDKLAAIEKDRDSARKDWKKINNIKEMKEGYLSQVVHEI
AKLVIEYNAIVVFEDLNFGFKRGRFKVEKQVYQKLEKMLIEKLNYLVFKDNEFDKTGGVLRA
YQLTAPFETFKKMGKQTGIIYYVPAGFTSKICPVTGFVNQLYPKYESVSKSQEFFSKFDKIC
YNLDKGYFEFSFDYKNFGDKAAKGKWTIASFGSRLINFRNSDKNHNWDTREVYPTKELEKLL
KDYSIEYGHGECIKAAICGESDKKFFAKLTSVLNTILQMRNSKTGTELDYLISPVADVNGNF
FDSRQAPKNMPQDAAANGAYHIGLKGLMLLGRIKNNQEGKKLNLVIKNEEYFEFVQNRNN
Francisella novicida Cpfl E1006A/D1255A (D917, A1006, and A1255 are
bolded and underlined)
MSIYQEFVNKYSLSKTLRFELIPQGKTLENIKARGLILDDEKRAKDYKKAKQIIDKYHQFFI
EEILSSVCISEDLLQNYSDVYFKLKKSDDDNLQKDFKSAKDTIKKQISEYIKDSEKFKNLFN
QNLIDAKKGQESDLILWLKQSKDNGIELFKANSDITDIDEALEIIKSFKGWTTYFKGFHENR
KNVYSSNDIPTSIIYRIVDDNLPKFLENKAKYESLKDKAPEAINYEQIKKDLAEELTFDIDY
KTSEVNQRVFSLDEVFEIANFNNYLNQSGITKFNTIIGGKFVNGENTKRKGINEYINLYSQQ
INDKTLKKYKMSVLFKQILSDTESKSFVIDKLEDDSDVVTTMQSFYEQIAAFKTVEEKSIKE
TLSLLFDDLKAQKLDLSKIYFKNDKSLTDLSQQVFDDYSVIGTAVLEYITQQIAPKNLDNPS
KKEQELIAKKTEKAKYLSLETIKLALEEFNKHRDIDKQCRFEEILANFAAIPMIFDEIAQNK
DNLAQISIKYQNQGKKDLLQASAEDDVKAIKDLLDQTNNLLHKLKIFHISQSEDKANILDKD
EHFYLVFEECYFELANIVPLYNKIRNYITQKPYSDEKFKLNFENSTLANGWDKNKEPDNTAI
LFIKDDKYYLGVMNKKNNKIFDDKAIKENKGEGYKKIVYKLLPGANKMLPKVFFSAKSIKFY
NPSEDILRIRNHSTHTKNGSPQKGYEKFEFNIEDCRKFIDFYKQSISKHPEWKDFGFRFSDT
QRYNSIDEFYREVENQGYKLTFENISESYIDSVVNQGKLYLFQIYNKDFSAYSKGRPNLHTL
YWKALFDERNLQDVVYKLNGEAELFYRKQSIPKKITHPAKEAIANKNKDNPKKESVFEYDLI
KDKRFTEDKFFFHCPITINFKSSGANKFNDEINLLLKEKANDVHILSIDRGERHLAYYTLVD
GKGNIIKQDTFNIIGNDRMKTNYHDKLAAIEKDRDSARKDWKKINNIKEMKEGYLSQVVHEI
AKLVIEYNAIVVFADLNFGFKRGRFKVEKQVYQKLEKMLIEKLNYLVFKDNEFDKTGGVLRA
YQLTAPFETFKKMGKQTGIIYYVPAGFTSKICPVTGFVNQLYPKYESVSKSQEFFSKFDKIC
YNLDKGYFEFSFDYKNFGDKAAKGKWTIASFGSRLINFRNSDKNHNWDTREVYPTKELEKLL
KDYSIEYGHGECIKAAICGESDKKFFAKLTSVLNTILQMRNSKTGTELDYLISPVADVNGNF
FDSRQAPKNMPQDAAANGAYHIGLKGLMLLGRIKNNQEGKKLNLVIKNEEYFEFVQNRNN
Francisella novicida Cpfl D917A/E1006A/D1255A (A917, A1006, and A1255 are
bolded and underlined)
MSIYQEFVNKYSLSKTLRFELIPQGKTLENIKARGLILDDEKRAKDYKKAKQIIDKYHQFFI
EEILSSVCISEDLLQNYSDVYFKLKKSDDDNLQKDFKSAKDTIKKQISEYIKDSEKFKNLFN
QNLIDAKKGQESDLILWLKQSKDNGIELFKANSDITDIDEALEIIKSFKGWTTYFKGFHENR
KNVYSSNDIPTSIIYRIVDDNLPKFLENKAKYESLKDKAPEAINYEQIKKDLAEELTFDIDY
KTSEVNQRVFSLDEVFEIANFNNYLNQSGITKFNTIIGGKFVNGENTKRKGINEYINLYSQQ
INDKTLKKYKMSVLFKQILSDTESKSFVIDKLEDDSDVVTTMQSFYEQIAAFKTVEEKSIKE
TLSLLFDDLKAQKLDLSKIYFKNDKSLTDLSQQVFDDYSVIGTAVLEYITQQIAPKNLDNPS
KKEQELIAKKTEKAKYLSLETIKLALEEFNKHRDIDKQCRFEEILANFAAIPMIFDEIAQNK
DNLAQISIKYQNQGKKDLLQASAEDDVKAIKDLLDQTNNLLHKLKIFHISQSEDKANILDKD
EHFYLVFEECYFELANIVPLYNKIRNYITQKPYSDEKFKLNFENSTLANGWDKNKEPDNTAI
LFIKDDKYYLGVMNKKNNKIFDDKAIKENKGEGYKKIVYKLLPGANKMLPKVFFSAKSIKFY
NPSEDILRIRNHSTHTKNGSPQKGYEKFEFNIEDCRKFIDFYKQSISKHPEWKDFGFRFSDT
QRYNSIDEFYREVENQGYKLTFENISESYIDSVVNQGKLYLFQIYNKDFSAYSKGRPNLHTL
YWKALFDERNLQDVVYKLNGEAELFYRKQSIPKKITHPAKEAIANKNKDNPKKESVFEYDLI
KDKRFTEDKFFFHCPITINFKSSGANKFNDEINLLLKEKANDVHILSIARGERHLAYYTLVD
GKGNIIKQDTFNIIGNDRMKTNYHDKLAAIEKDRDSARKDWKKINNIKEMKEGYLSQVVHEI
AKLVIEYNAIVVFADLNFGFKRGRFKVEKQVYQKLEKMLIEKLNYLVFKDNEFDKTGGVLRA
YQLTAPFETFKKMGKQTGIIYYVPAGFTSKICPVTGFVNQLYPKYESVSKSQEFFSKFDKIC
YNLDKGYFEFSFDYKNFGDKAAKGKWTIASFGSRLINFRNSDKNHNWDTREVYPTKELEKLL
KDYSIEYGHGECIKAAICGESDKKFFAKLTSVLNTILQMRNSKTGTELDYLISPVADVNGNF
FDSRQAPKNMPQDAAANGAYHIGLKGLMLLGRIKNNQEGKKLNLVIKNEEYFEFVQNRNN

[0395] In some embodiments, one of the Cas9 domains present in the fusion protein may be replaced with a guide nucleotide sequence-programmable DNA-binding protein domain that has no requirements for a PAM sequence.

[0396] In some embodiments, the Cas9 domain is a Cas9 domain from Staphylococcus aureus (SaCas9). In some embodiments, the SaCas9 domain is a nuclease active SaCas9, a nuclease inactive SaCas9 (SaCas9d), or a SaCas9 nickase (SaCas9n). In some embodiments, the SaCas9 comprises a N579A mutation, or a corresponding mutation in any of the amino acid sequences provided herein.

[0397] In some embodiments, the SaCas9 domain, the SaCas9d domain, or the SaCas9n domain can bind to a nucleic acid sequence having a non-canonical PAM. In some embodiments, the SaCas9 domain, the SaCas9d domain, or the SaCas9n domain can bind to a nucleic acid sequence having a NNGRRT or a NNGRRT PAM sequence. In some embodiments, the SaCas9 domain comprises one or more of a E781X, a N967X, and a R1014X mutation, or a corresponding mutation in any of the amino acid sequences provided herein, wherein X is any amino acid. In some embodiments, the SaCas9 domain comprises one or more of a E781K, a N967K, and a R1014H mutation, or one or more corresponding mutation in any of the amino acid sequences provided herein. In some embodiments, the SaCas9 domain comprises a E781K, a N967K, or a R1014H mutation, or corresponding mutations in any of the amino acid sequences provided herein.

### Exemplary SaCas9 Sequence

KRNYILGLDIGITSVGYGIIDYETRDVIDAGVRLFKEANVENNEGRRSKR
GARRLKRRRRHRIQRVKKLLFDYNLLTDHSELSGINPYEARVKGLSQKLS
EEEFSAALLHLAKRRGVHNVNEVEEDTGNELSTKEQISRNSKALEEKYVA
ELQLERLKKDGEVRGSINRFKTSDYVKEAKQLLKVQKAYHQLDQSFIDTY
IDLLETRRTYYEGPGEGSPFGWKDIKEWYEMLMGHCTYFPEELRSVKYAY
NADLYNALNDLNNLVITRDENEKLEYYEKFQIIENVFKQKKKPTLKQIAK
EILVNEEDIKGYRVTSTGKPEFTNLKVYHDIKDITARKEIIENAELLDQI
AKILTIYQSSEDIQEELTNLNSELTQEEIEQISNLKGYTGTHNLSLKAIN
LILDELWHTNDNQIAIFNRLKLVPKKVDLSQQKEIPTTLVDDFILSPVVK
RSFIQSIKVINAIIKKYGLPNDIIIELAREKNSKDAQKMINEMQKRNRQT
NERIEEIIRTTGKENAKYLIEKIKLHDMQEGKCLYSLEAIPLEDLLNNPF
NYEVDHIIPRSVSFDNSFNNKVLVKQEENSKKGNRTPFQYLSSSDSKISY
ETFKKHILNLAKGKGRISKTKKEYLLEERDINRFSVQKDFINRNLVDTRY
ATRGLMNLLRSYFRVNNLDVKVKSINGGFTSFLRRKWKFKKERNKGYKHH
AEDALIIANADFIFKEWKKLDKAKKVMENQMFEEKQAESMPEIETEQEYK
EIFITPHQIKHIKDFKDYKYSHRVDKKPNRELINDTLYSTRKDDKGNTLI
VNNLNGLYDKDNDKLKKLINKSPEKLLMYHHDPQTYQKLKLIMEQYGDEK
NPLYKYYEETGNYLTKYSKKDNGPVIKKIKYYGNKLNAHLDITDDYPNSR
NKVVKLSLKPYRFDVYLDNGVYKFVTVKNLDVIKKENYYEVNSKCYEEAK
KLKKISNQAEFIASFYNNDLIKINGELYRVIGVNNDLLNRIEVNMIDITY
REYLENMNDKRPPRIIKTIASKTQSIKKYSTDILGNLYEVKSKKHPQIIK
KG

[0399] Residue N579 above, which is underlined and in bold, may be mutated (e.g., to a A579) to yield a SaCas9 nickase.

### Exemplary SaCas9n Sequence

KRNYILGLDIGITSVGYGIIDYETRDVIDAGVRLFKEANVENNEGRRSKR
GARRLKRRRRHRIQRVKKLLFDYNLLTDHSELSGINPYEARVKGLSQKLS
EEEFSAALLHLAKRRGVHNVNEVEEDTGNELSTKEQISRNSKALEEKYVA
ELQLERLKKDGEVRGSINRFKTSDYVKEAKQLLKVQKAYHQLDQSFIDTY
IDLLETRRTYYEGPGEGSPFGWKDIKEWYEMLMGHCTYFPEELRSVKYAY
NADLYNALNDLNNLVITRDENEKLEYYEKFQIIENVFKQKKKPTLKQIAK
EILVNEEDIKGYRVTSTGKPEFTNLKVYHDIKDITARKEIIENAELLDQI
AKILTIYQSSEDIQEELTNLNSELTQEEIEQISNLKGYTGTHNLSLKAIN
LILDELWHTNDNQIAIFNRLKLVPKKVDLSQQKEIPTTLVDDFILSPVVK
RSFIQSIKVINAIIKKYGLPNDIIIELAREKNSKDAQKMINEMQKRNRQT
NERIEEIIRTTGKENAKYLIEKIKLHDMQEGKCLYSLEAIPLEDLLNNPF
NYEVDHIIPRSVSFDNSFNNKVLVKQEEASKKGNRTPFQYLSSSDSKISY
ETFKKHILNLAKGKGRISKIKKEYLLEERDINRFSVQKDFINRNLVDTRY
ATRGLMNLLRSYFRVNNLDVKVKSINGGFTSFLRRKWKFKKERNKGYKHH
AEDALIIANADFIFKEWKKLDKAKKVMENQMFEEKQAESMPEIETEQEYK
EIFITPHQIKHIKDFKDYKYSHRVDKKPNRELINDTLYSTRKDDKGNTLI
VNNLNGLYDKDNDKLKKLINKSPEKLLMYHHDPQTYQKLKLIMEQYGDEK
NPLYKYYEETGNYLTKYSKKDNGPVIKKIKYYGNKLNAHLDITDDYPNSR
NKVVKLSLKPYRFDVYLDNGVYKFVTVKNLDVIKKENYYEVNSKCYEEAK
KLKKISNQAEFIASFYNNDLIKINGELYRVIGVNNDLLNRIEVNMIDITY
REYLENMNDKRPPRIIKTIASKTQSIKKYSTDILGNLYEVKSKKHPQIIK
KG

[0401] Residue A579 above, which can be mutated from N579 to yield a SaCas9 nickase, is underlined and in bold.

### Exemplary SaKKH Cas9

KRNYILGLDIGITSVGYGIIDYETRDVIDAGVRLFKEANVENNEGRRSKR
GARRLKRRRRHRIQRVKKLLFDYNLLTDHSELSGINPYEARVKGLSQKLS
EEEFSAALLHLAKRRGVHNVNEVEEDTGNELSTKEQISRNSKALEEKYVA
ELQLERLKKDGEVRGSINRFKTSDYVKEAKQLLKVQKAYHQLDQSFIDTY
IDLLETRRTYYEGPGEGSPFGWKDIKEWYEMLMGHCTYFPEELRSVKYAY
NADLYNALNDLNNLVITRDENEKLEYYEKFQIIENVFKQKKKPTLKQIAK
EILVNEEDIKGYRVTSTGKPEFTNLKVYHDIKDITARKEIIENAELLDQI
AKILTIYQSSEDIQEELTNLNSELTQEEIEQISNLKGYTGTHNLSLKAIN
LILDELWHTNDNQIAIFNRLKLVPKKVDLSQQKEIPTTLVDDFILSPVVK
RSFIQSIKVINAIIKKYGLPNDIIIELAREKNSKDAQKMINEMQKRNRQT
NERIEEIIRTTGKENAKYLIEKIKLHDMQEGKCLYSLEAIPLEDLLNNPF
NYEVDHIIPRSVSFDNSFNNKVLVKQEEASKKGNRTPFQYLSSSDSKISY
ETFKKHILNLAKGKGRISKIKKEYLLEERDINRFSVQKDFINRNLVDTRY
ATRGLMNLLRSYFRVNNLDVKVKSINGGFTSFLRRKWKFKKERNKGYKHH
AEDALIIANADFIFKEWKKLDKAKKVMENQMFEEKQAESMPEIETEQEYK
EIFITPHQIKHIKDFKDYKYSHRVDKKPNRKLINDTLYSTRKDDKGNTLI
VNNLNGLYDKDNDKLKKLINKSPEKLLMYHHDPQTYQKLKLIMEQYGDEK
NPLYKYYEETGNYLTKYSKKDNGPVIKKIKYYGNKLNAHLDITDDYPNSR
NKVVKLSLKPYRFDVYLDNGVYKFVTVKNLDVIKKENYYEVNSKCYEEAK
KLKKISNQAEFIASFYKNDLIKINGELYRVIGVNNDLLNRIEVNMIDITY
REYLENMNDKRPPHIIKTIASKTQSIKKYSTDILGNLYEVKSKKHPQIIK
KG.

[0403] Residue A579 above, which can be mutated from N579 to yield a SaCas9 nickase, is underlined and in bold. Residues K781, K967, and H1014 above, which can be mutated from E781, N967, and R1014 to yield a SaKKH Cas9 are underlined and in italics.

[0404] In some embodiments, the napDNAbp is a circular permutant. In the following sequences, the plain text denotes an adenosine deaminase sequence, bold sequence indicates sequence derived from Cas9, the italics sequence denotes a linker sequence, and the underlined sequence denotes a bipartite nuclear localization sequence.

CP5 (with MSP “NGC” PID and “D10A” nickase):

EIGKATAKYFFYSNIMNFFKTEITLANGEIRKRPLIETNGETGEIVWDKG
RDFATVRKVLSMPQVNIVKKTEVQTGGFSKESILPKRNSDKLIARKKDWD
PKKYGGFMQPTVAYSVLVVAKVEKGKSKKLKSVKELLGITIMERSSFEKN
PIDFLEAKGYKEVKKDLIIKLPKYSLFELENGRKRMLASAKFLQKGNELA
LPSKYVNFLYLASHYEKLKGSPEDNEQKQLFVEQHKHYLDEIIEQISEFS
KRVILADANLDKVLSAYNKHRDKPIREQAENIIHLFTLTNLGAPRAFKYF
DTTIARKEYRSTKEVLDATLIHQSITGLYETRIDLSQLGGDGGSGGSGGS
GGSGGSGGSGGMDKKYSIGLAIGTNSVGWAVITDEYKVPSKKFKVLGNTD
RHSIKKNLIGALLFDSGETAEATRLKRTARRRYTRRKNRICYLQEIFSNE
MAKVDDSFFHRLEESFLVEEDKKHERHPIFGNIVDEVAYHEKYPTIYHLR
KKLVDSTDKADLRLIYLALAHMIKFRGHFLIEGDLNPDNSDVDKLFIQLV
QTYNQLFEENPINASGVDAKAILSARLSKSRRLENLIAQLPGEKKNGLFG
NLIALSLGLTPNFKSNFDLAEDAKLQLSKDTYDDDLDNLLAQIGDQYADL
FLAAKNLSDAILLSDILRVNTEITKAPLSASMIKRYDEHHQDLTLLKALV
RQQLPEKYKEIFFDQSKNGYAGYIDGGASQEEFYKFIKPILEKMDGTEEL
LVKLNREDLLRKQRTFDNGSIPHQIHLGELHAILRRQEDFYPFLKDNREK
IEKILTFRIPYYVGPLARGNSRFAWMTRKSEETITPWNFEEVVDKGASAQ
SFIERMTNFDKNLPNEKVLPKHSLLYEYFTVYNELTKVKYVTEGMRKPAF
LSGEQKKAIVDLLFKTNRKVTVKQLKEDYFKKIECFDSVEISGVEDRFNA
SLGTYHDLLKIIKDKDFLDNEENEDILEDIVLTLTLFEDREMIEERLKTY
AHLFDDKVMKQLKRRRYTGWGRLSRKLINGIRDKQSGKTILDFLKSDGFA
NRNFMQLIHDDSLTFKEDIQKAQVSGQGDSLHEHIANLAGSPAIKKGILQ
TVKVVDELVKVMGRHKPENIVIEMARENQTTQKGQKNSRERMKRIEEGIK
ELGSQILKEHPVENTQLQNEKLYLYYLQNGRDMYVDQELDINRLSDYDVD
HIVPQSFLKDDSIDNKVLTRSDKNRGKSDNVPSEEVVKKMKNYWRQLLNA
KLITQRKFDNLTKAERGGLSELDKAGFIKRQLVETRQITKHVAQILDSRM
NTKYDENDKLIREVKVITLKSKLVSDFRKDFQFYKVREINNYHHAHDAYL
NAVVGTALIKKYPKLESEFVYGDYKVYDVRKMIAKSEQEGADKRTADGSE
FESPKKKRKV*

[0405] In some embodiments, the nucleic acid programmable DNA binding protein (napDNAbp) is a single effector of a microbial CRISPR-Cas system. Single effectors of microbial CRISPR-Cas systems include, without limitation, Cas9, Cpf1, Cas12b/C2c1, and Cas12c/C2c3. Typically, microbial CRISPR-Cas systems are divided into Class 1 and Class 2 systems. Class 1 systems have multisubunit effector complexes, while Class 2 systems have a single protein effector. For example, Cas9 and Cpf1 are Class 2 effectors. In addition to Cas9 and Cpf1, three distinct Class 2 CRISPR-Cas systems (Cas12b/C2c1, and Cas12c/C2c3) have been described by Shmakov et al., “Discovery and Functional Characterization of Diverse Class 2 CRISPR Cas Systems”, Mol. Cell, 2015 Nov. 5; 60(3): 385-397, the entire contents of which is hereby incorporated by reference. Effectors of two of the systems, Cas12b/C2c1, and Cas12c/C2c3, contain RuvC-like endonuclease domains related to Cpf1. A third system, contains an effector with two predicated HEPN RNase domains. Production of mature CRISPR RNA is tracrRNA-independent, unlike production of CRISPR RNA by Cas12b/C2c1. Cas12b/C2c1 depends on both CRISPR RNA and tracrRNA for DNA cleavage.

[0406] The crystal structure of Alicyclobaccillus acidoterrastris Cas12b/C2c1 (AacC2c1) has been reported in complex with a chimeric single-molecule guide RNA (sgRNA). See e.g., Liu et al., “C2c1-sgRNA Complex Structure Reveals RNA-Guided DNA Cleavage Mechanism”, Mol. Cell, 2017 Jan. 19; 65(2):310-322, the entire contents of which are hereby incorporated by reference. The crystal structure has also been reported in Alicyclobacillus acidoterrestris C2c1 bound to target DNAs as ternary complexes. See e.g., Yang et al., “PAM-dependent Target DNA Recognition and Cleavage by C2C1 CRISPR-Cas endonuclease”, Cell, 2016 Dec. 15; 167(7):1814-1828, the entire contents of which are hereby incorporated by reference. Catalytically competent conformations of AacC2c1, both with target and non-target DNA strands, have been captured independently positioned within a single RuvC catalytic pocket, with Cas12b/C2c1-mediated cleavage resulting in a staggered seven-nucleotide break of target DNA. Structural comparisons between Cas12b/C2c1 ternary complexes and previously identified Cas9 and Cpf1 counterparts demonstrate the diversity of mechanisms used by CRISPR-Cas9 systems.

[0407] In some embodiments, the nucleic acid programmable DNA binding protein (napDNAbp) of any of the fusion proteins provided herein may be a Cas12b/C2c1, or a Cas12c/C2c3 protein. In some embodiments, the napDNAbp is a Cas12b/C2c1 protein. In some embodiments, the napDNAbp is a Cas12c/C2c3 protein. In some embodiments, the napDNAbp comprises an amino acid sequence that is at least 85%, at least 90%, at least 91%, at least 92%, at least 93%, at least 94%, at least 95%, at least 96%, at least 97%, at least 98%, at least 99%, or at ease 99.5% identical to a naturally-occurring Cas12b/C2c1 or Cas12c/C2c3 protein. In some embodiments, the napDNAbp is a naturally-occurring Cas12b/C2c1 or Cas12c/C2c3 protein. In some embodiments, the napDNAbp comprises an amino acid sequence that is at least 85%, at least 90%, at least 91%, at least 92%, at least 93%, at least 94%, at least 95%, at least 96%, at least 97%, at least 98%, at least 99%, or at ease 99.5% identical to any one of the napDNAbp sequences provided herein. It should be appreciated that Cas12b/C2c1 or Cas12c/C2c3 from other bacterial species may also be used in accordance with the present disclosure.

[0408] A Cas12b/C2c1 ((uniprot.org/uniprot/T0D7A2#2) sp|T0D7A2|C2C1_ALIAG CRISPR-associated endonuclease C2c1 OS=Alicyclobacillus acido-terrestris (strain ATCC 49025/DSM 3922/CIP 106132/NCIMWB 13137/GD3B) GN=c2c1 PE=1 SV=1) amino acid sequence is as follows:

MAVKSIKVKLRLDDMPEIRAGLWKLHKEVNAGVRYYTEWLSLLRQENLYR
RSPNGDGEQECDKTAEECKAELLERLRARQVENGHRGPAGSDDELLQLAR
QLYELLVPQAIGAKGDAQQIARKFLSPLADKDAVGGLGIAKAGNKPRWVR
MREAGEPGWEEEKEKAETRKSADRTADVLRALADFGLKPLMRVYTDSEMS
SVEWKPLRKGQAVRTWDRDMFQQAIERMMSWESWNQRVGQEYAKLVEQKN
RFEQKNFVGQEHLVHLVNQLQQDMKEASPGLESKEQTAHYVTGRALRGSD
KVFEKWGKLAPDAPFDLYDAEIKNVQRRNTRRFGSHDLFAKLAEPEYQAL
WREDASFLTRYAVYNSILRKLNHAKMFATFTLPDATAHPIWTRFDKLGGN
LHQYTFLFNEFGERRHAIRFHKLLKVENGVAREVDDVTVPISMSEQLDNL
LPRDPNEPIALYFRDYGAEQHFTGEFGGAKIQCRRDQLAHMHRRRGARDV
YLNVSVRVQSQSEARGERRPPYAAVFRLVGDNHRAFVHFDKLSDYLAEHP
DDGKLGSEGLLSGLRVMSVDLGLRTSASISVFRVARKDELKPNSKGRVPF
FFPIKGNDNLVAVHERSQLLKLPGETESKDLRAIREERQRTLRQLRTQLA
YLRLLVRCGSEDVGRRERSWAKLIEQPVDAANHMTPDWREAFENELQKLK
SLHGICSDKEWMDAVYESVRRVWRHMGKQVRDWRKDVRSGERPKIRGYAK
DVVGGNSIEQIEYLERQYKFLKSWSFFGKVSGQVIRAEKGSRFAITLREH
IDHAKEDRLKKLADRIIMEALGYVYALDERGKGKWVAKYPPCQLILLEEL
SEYQFNNDRPPSENNQLMQWSHRGVFQELINQAQVHDLLVGTMYAAFSSR
FDARTGAPGIRCRRVPARCTQEHNPEPFPWWLNKFVVEHTLDACPLRADD
LIPTGEGEIFVSPFSAEEGDFHQIHADLNAAQNLQQRLWSDFDISQIRLR
CDWGEVDGELVLIPRLTGKRTADSYSNKVFYTNTGVTYYERERGKKRRKV
FAQEKLSEEEAELLVEADEAREKSVVLMRDPSGIINRGNWTRQKEFWSMV
NQRIEGYLVKQIRSRVPLQDSACENTGDI.

[0409] AacCas12b (Alicyclobacillus acidiphilus)—WP_067623834

MAVKSMKVKLRLDNMPEIRAGLWKLHTEVNAGVRYYTEWLSLLRQENLYR
RSPNGDGEQECYKTAEECKAELLERLRARQVENGHCGPAGSDDELLQLAR
QLYELLVPQAIGAKGDAQQIARKFLSPLADKDAVGGLGIAKAGNKPRWVR
MREAGEPGWEEEKAKAEARKSTDRTADVLRALADFGLKPLMRVYTDSDMS
SVQWKPLRKGQAVRTWDRDMFQQAIERMMSWESWNQRVGEAYAKLVEQKS
RFEQKNFVGQEHLVQLVNQLQQDMKEASHGLESKEQTAHYLTGRALRGSD
KVFEKWEKLDPDAPFDLYDTEIKNVQRRNTRRFGSHDLFAKLAEPKYQAL
WREDASFLTRYAVYNSIVRKLNHAKMFATFTLPDATAHPIWTRFDKLGGN
LHQYTFLFNEFGEGRHAIRFQKLLTVEDGVAKEVDDVTVPISMSAQLDDL
LPRDPHELVALYFQDYGAEQHLAGEFGGAKIQYRRDQLNHLHARRGARDV
YLNLSVRVQSQSEARGERRPPYAAVFRLVGDNHRAFVHFDKLSDYLAEHP
DDGKLGSEGLLSGLRVMSVDLGLRTSASISVFRVARKDELKPNSEGRVPF
CFPIEGNENLVAVHERSQLLKLPGETESKDLRAIREERQRTLRQLRTQLA
YLRLLVRCGSEDVGRRERSWAKLIEQPMDANQMTPDWREAFEDELQKLKS
LYGICGDREWTEAVYESVRRVWRHMGKQVRDWRKDVRSGERPKIRGYQKD
VVGGNSIEQIEYLERQYKFLKSWSFFGKVSGQVIRAEKGSRFAITLREHI
DHAKEDRLKKLADRIIMEALGYVYALDDERGKGKWVAKYPPCQLILLEEL
SEYQFNNDRPPSENNQLMQWSHRGVFQELLNQAQVHDLLVGTMYAAFSSR
FDARTGAPGIRCRRVPARCAREQNPEPFPWWLNKFVAEHKLDGCPLRADD
LIPTGEGEFFVSPFSAEEGDFHQIHADLNAAQNLQRRLWSDFDISQIRLR
CDWGEVDGEPVLIPRTTGKRTADSYGNKVFYTKTGVTYYERERGKKRRKV
FAQEELSEEEAELLVEADEAREKSVVLMRDPSGIINRGDWTRQKEFWSMV
NQRIEGYLVKQIRSRVRLQESACENTGDI

[0410] BhCas12b (Bacillus hisashii) NCBI Reference Sequence: WP_095142515

MAPKKKRKVGIHGVPAAATRSFILKIEPNEEVKKGLWKTHEVLNHGIAYY
MNILKLIRQEAIYEHHEQDPKNPKKVSKAEIQAELWDFVLKMQKCNSFTH
EVDKDEVFNILRELYEELVPSSVEKKGEANQLSNKFLYPLVDPNSQSGKG
TASSGRKPRWYNLKIAGDPSWEEEKKKWEEDKKKDPLAKILGKLAEYGLI
PLFIPYTDSNEPIVKEIKWMEKSRNQSVRRLDKDMFIQALERFLSWESWN
LKVKEEYEKVEKEYKTLEERIKEDIQALKALEQYEKERQEQLLRDTLNTN
EYRLSKRGLRGWREIIQKWLKMDENEPSEKYLEVFKDYQRKHPREAGDYS
VYEFLSKKENHFIWRNHPEYPYLYATFCEIDKKKKDAKQQATFTLADPIN
HPLWVRFEERSGSNLNKYRILTEQLHTEKLKKKLTVQLDRLIYPTESGGW
EEKGKVDIVLLPSRQFYNQIFLDIEEKGKHAFTYKDESIKFPLKGTLGGA
RVQFDRDHLRRYPHKVESGNVGRIYFNMTVNIEPTESPVSKSLKIHRDDF
PKVVNFKPKELTEWIKDSKGKKLKSGIESLEIGLRVMSIDLGQRQAAAAS
IFEVVDQKPDIEGKLFFPIKGTELYAVHRASFNIKLPGETLVKSREVLRK
AREDNLKLMNQKLNFLRNVLHFQQFEDITEREKRVTKWISRQENSDVPLV
YQDELIQIRELMYKPYKDWVAFLKQLHKRLEVEIGKEVKHWRKSLSDGRK
GLYGISLKNIDEIDRTRKFLLRWSLRPTEPGEVRRLEPGQRFAIDQLNHL
NALKEDRLKKMANTIIMHALGYCYDVRKKKWQAKNPACQIILFEDLSNYN
PYEERSRFENSKLMKWSRREIPRQVALQGEIYGLQVGEVGAQFSSRFHAK
TGSPGIRCSVVTKEKLQDNRFFKNLQREGRLTLDKIAVLKEGDLYPDKGG
EKFISLSKDRKCVTTHADINAAQNLQKRFWTRTHGFYKVYCKAYQVDGQT
VYIPESKDQKQKIIEEFGEGYFILKDGVYEWVNAGKLKIKKGSSKQSSSE
LVDSDILKDSFDLASELKGEKLMLYRDPSGNVFPSDKWMAAGVFFGKLER
ILISKLTNQYSISTIEDDSSKQSMKRPAATKKAGQAKKKK

variant termed BvCas12b V4 (S893R/K846R/E837G changes rel. to wt is expressed as follows: 5′ mRNA Cap---5′UTR---bhCas12b--STOP sequence---3′UTR---120polyA tail 5′UTR:

GGGAAATAAGAGAGAAAAGAAGAGTAAGAAGAAATATAAGAGCCACC

### 3′ UTR (TriLink Standard UTR)

GCTGGAGCCTCGGTGGCCATGCTTCTTGCCCCTTGGGCCTCCCCCCAGCC
CCTCCTCCCCTTCCTGCACCCGTACCCCCGTGGTCTTTGAATAAAGTCTG
A

Nucleic Acid Sequence of bhCas12 (V4)

ATGGCCCCAAAGAAGAAGCGGAAGGTCGGTATCCACGGAGTCCCAGCAGC
CGCCACCAGATCCTTCATCCTGAAGATCGAGCCCAACGAGGAAGTGAAGA
AAGGCCTCTGGAAAACCCACGAGGTGCTGAACCACGGAATCGCCTACTAC
ATGAATATCCTGAAGCTGATCCGGCAAGAGGCCATCTACGAGCACCACGA
GCAGGACCCCAAGAATCCCAAGAAGGTGTCCAAGGCCGAGATCCAGGCCG
AGCTGTGGGATTTCGTGCTGAAGATGCAGAAGTGCAACAGCTTCACACAC
GAGGTGGACAAGGACGAGGTGTTCAACATCCTGAGAGAGCTGTACGAGGA
ACTGGTGCCCAGCAGCGTGGAAAAGAAGGGCGAAGCCAACCAGCTGAGCA
ACAAGTTTCTGTACCCTCTGGTGGACCCCAACAGCCAGTCTGGAAAGGGA
ACAGCCAGCAGCGGCAGAAAGCCCAGATGGTACAACCTGAAGATTGCCGG
CGATCCCTCCTGGGAAGAAGAGAAGAAGAAGTGGGAAGAAGATAAGAAAA
AGGACCCGCTGGCCAAGATCCTGGGCAAGCTGGCTGAGTACGGACTGATC
CCTCTGTTCATCCCCTACACCGACAGCAACGAGCCCATCGTGAAAGAAAT
CAAGTGGATGGAAAAGTCCCGGAACCAGAGCGTGCGGCGGCTGGATAAGG
ACATGTTCATTCAGGCCCTGGAACGGTTCCTGAGCTGGGAGAGCTGGAAC
CTGAAAGTGAAAGAGGAATACGAGAAGGTCGAGAAAGAGTACAAGACCCT
GGAAGAGAGGATCAAAGAGGACATCCAGGCTCTGAAGGCTCTGGAACAGT
ATGAGAAAGAGCGGCAAGAACAGCTGCTGCGGGACACCCTGAACACCAAC
GAGTACCGGCTGAGCAAGAGAGGCCTTAGAGGCTGGCGGGAAATCATCCA
GAAATGGCTGAAAATGGACGAGAACGAGCCCTCCGAGAAGTACCTGGAAG
TGTTCAAGGACTACCAGCGGAAGCACCCTAGAGAGGCCGGCGATTACAGC
GTGTACGAGTTCCTGTCCAAGAAAGAGAACCACTTCATCTGGCGGAATCA
CCCTGAGTACCCCTACCTGTACGCCACCTTCTGCGAGATCGACAAGAAAA
AGAAGGACGCCAAGCAGCAGGCCACCTTCACACTGGCCGATCCTATCAAT
CACCCTCTGTGGGTCCGATTCGAGGAAAGAAGCGGCAGCAACCTGAACAA
GTACAGAATCCTGACCGAGCAGCTGCACACCGAGAAGCTGAAGAAAAAGC
TGACAGTGCAGCTGGACCGGCTGATCTACCCTACAGAATCTGGCGGCTGG
GAAGAGAAGGGCAAAGTGGACATTGTGCTGCTGCCCAGCCGGCAGTTCTA
CAACCAGATCTTCCTGGACATCGAGGAAAAGGGCAAGCACGCCTTCACCT
ACAAGGATGAGAGCATCAAGTTCCCTCTGAAGGGCACACTCGGCGGAGCC
AGAGTGCAGTTCGACAGAGATCACCTGAGAAGATACCCTCACAAGGTGGA
AAGCGGCAACGTGGGCAGAATCTACTTCAACATGACCGTGAACATCGAGC
CTACAGAGTCCCCAGTGTCCAAGTCTCTGAAGATCCACCGGGACGACTTC
CCCAAGGTGGTCAACTTCAAGCCCAAAGAACTGACCGAGTGGATCAAGGA
CAGCAAGGGCAAGAAACTGAAGTCCGGCATCGAGTCCCTGGAAATCGGCC
TGAGAGTGATGAGCATCGACCTGGGACAGAGACAGGCCGCTGCCGCCTCT
ATTTTCGAGGTGGTGGATCAGAAGCCCGACATCGAAGGCAAGCTGTTTTT
CCCAATCAAGGGCACCGAGCTGTATGCCGTGCACAGAGCCAGCTTCAACA
TCAAGCTGCCCGGCGAGACACTGGTCAAGAGCAGAGAAGTGCTGCGGAAG
GCCAGAGAGGACAATCTGAAACTGATGAACCAGAAGCTCAACTTCCTGCG
GAACGTGCTGCACTTCCAGCAGTTCGAGGACATCACCGAGAGAGAGAAGC
GGGTCACCAAGTGGATCAGCAGACAAGAGAACAGCGACGTGCCCCTGGTG
TACCAGGATGAGCTGATCCAGATCCGCGAGCTGATGTACAAGCCTTACAA
GGACTGGGTCGCCTTCCTGAAGCAGCTCCACAAGAGACTGGAAGTCGAGA
TCGGCAAAGAAGTGAAGCACTGGCGGAAGTCCCTGAGCGACGGAAGAAAG
GGCCTGTACGGCATCTCCCTGAAGAACATCGACGAGATCGATCGGACCCG
GAAGTTCCTGCTGAGATGGTCCCTGAGGCCTACCGAACCTGGCGAAGTGC
GTAGACTGGAACCCGGCCAGAGATTCGCCATCGACCAGCTGAATCACCTG
AACGCCCTGAAAGAAGATCGGCTGAAGAAGATGGCCAACACCATCATCAT
GCACGCCCTGGGCTACTGCTACGACGTGCGGAAGAAGAAATGGCAGGCTA
AGAACCCCGCCTGCCAGATCATCCTGTTCGAGGATCTGAGCAACTACAAC
CCCTACGAGGAAAGGTCCCGCTTCGAGAACAGCAAGCTCATGAAGTGGTC
CAGACGCGAGATCCCCAGACAGGTTGCACTGCAGGGCGAGATCTATGGCC
TGCAAGTGGGAGAAGTGGGCGCTCAGTTCAGCAGCAGATTCCACGCCAAG
ACAGGCAGCCCTGGCATCAGATGTAGCGTCGTGACCAAAGAGAAGCTGCA
GGACAATCGGTTCTTCAAGAATCTGCAGAGAGAGGGCAGACTGACCCTGG
ACAAAATCGCCGTGCTGAAAGAGGGCGATCTGTACCCAGACAAAGGCGGC
GAGAAGTTCATCAGCCTGAGCAAGGATCGGAAGTGCGTGACCACACACGC
CGACATCAACGCCGCTCAGAACCTGCAGAAGCGGTTCTGGACAAGAACCC
ACGGCTTCTACAAGGTGTACTGCAAGGCCTACCAGGTGGACGGCCAGACC
GTGTACATCCCTGAGAGCAAGGACCAGAAGCAGAAGATCATCGAAGAGTT
CGGCGAGGGCTACTTCATTCTGAAGGACGGGGTGTACGAATGGGTCAACG
CCGGCAAGCTGAAAATCAAGAAGGGCAGCTCCAAGCAGAGCAGCAGCGAG
CTGGTGGATAGCGACATCCTGAAAGACAGCTTCGACCTGGCCTCCGAGCT
GAAAGGCGAAAAGCTGATGCTGTACAGGGACCCCAGCGGCAATGTGTTCC
CCAGCGACAAATGGATGGCCGCTGGCGTGTTCTTCGGAAAGCTGGAACGC
ATCCTGATCAGCAAGCTGACCAACCAGTACTCCATCAGCACCATCGAGGA
CGACAGCAGCAAGCAGTCTATGAAAAGGCCGGCGGCCACGAAAAAGGCCG
GCCAGGCAAAAAAGAAAAAG

[0412] In some embodiments, the Cas12b is BvCas12B. In some embodiments, the BvCas12B comprises the following changes relative to the wild type sequence B: S893R, K846R, and E837G as numbered in BvCas12B exemplary sequence provided below. BvCas12b (Bacillus sp. V3-13) NCBI Reference Sequence: WP_101661451.1

MAIRSIKLKMKTNSGTDSIYLRKALWRTHQLINEGIAYYMNLLTLYRQEA
IGDKTKEAYQAELINIIRNQQRNNGSSEEHGSDQEILALLRQLYELIIPS
SIGESGDANQLGNKFLYPLVDPNSQSGKGTSNAGRKPRWKRLKEEGNPDW
ELEKKKDEERKAKDPTVKIFDNLNKYGLLPLFPLFTNIQKDIEWLPLGKR
QSVRKWDKDMFIQAIERLLSWESWNRRVADEYKQLKEKTESYYKEHLTGG
EEWIEKIRKFEKERNMELEKNAFAPNDGYFITSRQIRGWDRVYEKWSKLP
ESASPEELWKVVAEQQNKMSEGFGDPKVFSFLANRENRDIWRGHSERIYH
IAAYNGLQKKLSRTKEQATFTLPDAIEHPLWIRYESPGGTNLNLFKLEEK
QKKNYYVTLSKIIWPSEEKWIEKENIEIPLAPSIQFNRQIKLKQHVKGKQ
EISFSDYSSRISLDGVLGGSRIQFNRKYIKNHKELLGEGDIGPVFFNLVV
DVAPLQETRNGRLQSPIGKALKVISSDFSKVIDYKPKELMDWMNTGSASN
SFGVASLLEGMRVMSIDMGQRTSASVSIFEVVKELPKDQEQKLFYSINDT
ELFAIHKRSFLLNLPGEVVTKNNKQQRQERRKKRQFVRSQIRMLANVLRL
ETKKTPDERKKAIHKLMEIVQSYDSWTASQKEVWEKELNLLTNMAAFNDE
IWKESLVELHHRIEPYVGQIVSKWRKGLSEGRKNLAGISMWNIDELEDTR
RLLISWSKRSRTPGEANRIETDEPFGSSLLQHIQNVKDDRLKQMANLIIM
TALGFKYDKEEKDRYKRWKETYPACQIILFENLNRYLFNLDRSRRENSRL
MKWAHRSIPRTVSMQGEMFGLQVGDVRSEYSSRFHAKTGAPGIRCHALTE
EDLKAGSNTLKRLIEDGFINESELAYLKKGDIIPSQGGELFVTLSKRYKK
DSDNNELTVIHADINAAQNLQKRFWQQNSEVYRVPCQLARMGEDKLYIPK
SQTETIKKYFGKGSFVKNNTEQEVYKWEKSEKMKIKTDTTFDLQDLDGFE
DISKTIELAQEQQKKYLTMFRDPSGYFFNNETWRPQKEYWSIVNNIIKSC
LKKKILSNKVEL

[0413] In some embodiments, the Cas12b is BTCas12b.

[0414] BTCas12b (Bacillus thermoamylovorans) NCBI Reference Sequence: WP_041902512

MATRSFILKIEPNEEVKKGLWKTHEVLNHGIAYYMNILKLIRQEAIYEHH
EQDPKNPKKVSKAEIQAELWDFVLKMQKCNSFTHEVDKDVVFNILRELYE
ELVPSSVEKKGEANQLSNKFLYPLVDPNSQSGKGTASSGRKPRWYNLKIA
GDPSWEEEKKKWEEDKKKDPLAKILGKLAEYGLIPLFIPFTDSNEPIVKE
IKWMEKSRNQSVRRLDKDMFIQALERFLSWESWNLKVKEEYEKVEKEHKT
LEERIKEDIQAFKSLEQYEKERQEQLLRDTLNTNEYRLSKRGLRGWREII
QKWLKMDENEPSEKYLEVFKDYQRKHPREAGDYSVYEFLSKKENHFIWRN
HPEYPYLYATFCEIDKKKKDAKQQATFTLADPINHPLWVRFEERSGSNLN
KYRILTEQLHTEKLKKKLTVQLDRLIYPTESGGWEEKGKVDIVLLPSRQF
YNQIFLDIEEKGKHAFTYKDESIKFPLKGTLGGARVQFDRDHLRRYPHKV
ESGNVGRIYFNMTVNIEPTESPVSKSLKIHRDDFPKFVNFKPKELTEWIK
DSKGKKLKSGIESLEIGLRVMSIDLGQRQAAAASIFEVVDQKPDIEGKLF
FPIKGTELYAVHRASFNIKLPGETLVKSREVLRKAREDNLKLMNQKLNFL
RNVLHFQQFEDITEREKRVTKWISRQENSDVPLVYQDELIQIRELMYKPY
KDWVAFLKQLHKRLEVEIGKEVKHWRKSLSDGRKGLYGISLKNIDEIDRT
RKFLLRWSLRPTEPGEVRRLEPGQRFAIDQLNHLNALKEDRLKKMANTII
MHALGYCYDVRKKKWQAKNPACQIILFEDLSNYNPYEERSRFENSKLMKW
SRREIPRQVALQGEIYGLQVGEVGAQFSSRFHAKTGSPGIRCSVVTKEKL
QDNRFFKNLQREGRLTLDKIAVLKEGDLYPDKGGEKFISLSKDRKLVTTH
ADINAAQNLQKRFWTRTHGFYKVYCKAYQVDGQTVYIPESKDQKQKIIEE
FGEGYFILKDGVYEWGNAGKLKIKKGSSKQSSSELVDSDILKDSFDLASE
LKGEKLMLYRDPSGNVFPSDKWMAAGVFFGKLERILISKLTNQYSISTIE
DDSSKQSM

[0415] In some embodiments, a napDNAbp refers to Cas12c. In some embodiments, the Cas12c protein is a Cas12c1 or a variant of Cas12c1. In some embodiments, the Cas12 protein is a Cas12c2 or a variant of Cas12c2. In some embodiments, the Cas12 protein is a Cas12c protein from Oleiphilus sp. HI0009 (i.e., OspCas12c) or a variant of OspCas12c. These Cas12c molecules have been described in Yan et al., “Functionally Diverse Type V CRISPR-Cas Systems,” Science, 2019 Jan. 4; 363: 88-91; the entire contents of which is hereby incorporated by reference. In some embodiments, the napDNAbp comprises an amino acid sequence that is at least 85%, at least 90%, at least 91%, at least 92%, at least 93%, at least 94%, at least 95%, at least 96%, at least 97%, at least 98%, at least 99%, or at least 99.5% identical to a naturally-occurring Cas12c1, Cas12c2, or OspCas12c protein. In some embodiments, the napDNAbp is a naturally-occurring Cas12c1, Cas12c2, or OspCas12c protein. In some embodiments, the napDNAbp comprises an amino acid sequence that is at least 85%, at least 90%, at least 91%, at least 92%, at least 93%, at least 94%, at least 95%, at least 96%, at least 97%, at least 98%, at least 99%, or at ease 99.5% identical to any Cas12c1, Cas12c2, or OspCas12c protein described herein. It should be appreciated that Cas12c1, Cas12c2, or OspCas12c from other bacterial species may also be used in accordance with the present disclosure.

Cas12c1
MQTKKTHLHLISAKASRKYRRTIACLSDTAKKDLERRKQSGAADPAQELSCLKTIKFKLEVP
EGSKLPSFDRISQIYNALETIEKGSLSYLLFALILSGFRIFPNSSAAKTFASSSCYKNDQFA
SQIKEIFGEMVKNFIPSELESILKKGRRKNNKDWTEENIKRVLNSEFGRKNSEGSSALFDSF
LSKFSQELFRKFDSWNEVNKKYLEAAELLDSMLASYGPFDSVCKMIGDSDSRNSLPDKSTIA
FTNNAEITVDIESSVMPYMAIAALLREYRQSKSKAAPVAYVQSHLTTTNGNGLSWFFKFGLD
LIRKAPVSSKQSTSDGSKSLQELFSVPDDKLDGLKFIKEACEALPEASLLCGEKGELLGYQD
FRTSFAGHIDSWVANYVNRLFELIELVNQLPESIKLPSILTQKNHNLVASLGLQEAEVSHSL
ELFEGLVKNVRQTLKKLAGIDISSSPNEQDIKEFYAFSDVLNRLGSIRNQIENAVQTAKKDK
IDLESAIEWKEWKKLKKLPKLNGLGGGVPKQQELLDKALESVKQIRHYQRIDFERVIQWAVN
EHCLETVPKFLVDAEKKKINKESSTDFAAKENAVRFLLEGIGAAARGKTDSVSKAAYNWFVV
NNFLAKKDLNRYFINCQGCIYKPPYSKRRSLAFALRSDNKDTIEVVWEKFETFYKEISKEIE
KFNIFSQEFQTFLHLENLRMKLLLRRIQKPIPAEIAFFSLPQEYYDSLPPNVAFLALNQEIT
PSEYITQFNLYSSFLNGNLILLRRSRSYLRAKFSWVGNSKLIYAAKEARLWKIPNAYWKSDE
WKMILDSNVLVFDKAGNVLPAPTLKKVCEREGDLRLFYPLLRQLPHDWCYRNPFVKSVGREK
NVIEVNKEGEPKVASALPGSLFRLIGPAPFKSLLDDCFFNPLDKDLRECMLIVDQEISQKVE
AQKVEASLESCTYSIAVPIRYHLEEPKVSNQFENVLAIDQGEAGLAYAVFSLKSIGEAETKP
IAVGTIRIPSIRRLIHSVSTYRKKKQRLQNFKQNYDSTAFIMRENVTGDVCAKIVGLMKEFN
AFPVLEYDVKNLESGSRQLSAVYKAVNSHFLYFKEPGRDALRKQLWYGGDSWTIDGIEIVTR
ERKEDGKEGVEKIVPLKVFPGRSVSARFTSKTCSCCGRNVFDWLFTEKKAKTNKKFNVNSKG
ELTTADGVIQLFEADRSKGPKFYARRKERTPLTKPIAKGSYSLEEIERRVRTNLRRAPKSKQ
SRDTSQSQYFCVYKDCALHFSGMQADENAAINIGRRFLTALRKNRRSDFPSNVKISDRLLDN
Cas12c2
MTKHSIPLHAFRNSGADARKWKGRIALLAKRGKETMRTLQFPLEMSEPEAAAINTTPFAVAY
NAIEGTGKGTLFDYWAKLHLAGFRFFPSGGAATIFRQQAVFEDASWNAAFCQQSGKDWPWLV
PSKLYERFTKAPREVAKKDGSKKSIEFTQENVANESHVSLVGASITDKTPEDQKEFFLKMAG
ALAEKFDSWKSANEDRIVAMKVIDEFLKSEGLHLPSLENIAVKCSVETKPDNATVAWHDAPM
SGVQNLAIGVFATCASRIDNIYDLNGGKLSKLIQESATTPNVTALSWLFGKGLEYFRTTDID
TIMQDFNIPASAKESIKPLVESAQAIPTMTVLGKKNYAPFRPNFGGKIDSWIANYASRLMLL
NDILEQIEPGFELPQALLDNETLMSGIDMTGDELKELIEAVYAWVDAAKQGLATLLGRGGNV
DDAVQTFEQFSAMMDTLNGTLNTISARYVRAVEMAGKDEARLEKLIECKFDIPKWCKSVPKL
VGISGGLPKVEEEIKVMNAAFKDVRARMFVRFEEIAAYVASKGAGMDVYDALEKRELEQIKK
LKSAVPERAHIQAYRAVLHRIGRAVQNCSEKTKQLFSSKVIEMGVFKNPSHLNNFIFNQKGA
IYRSPFDRSRHAPYQLHADKLLKNDWLELLAEISATLMASESTEQMEDALRLERTRLQLQLS
GLPDWEYPASLAKPDIEVEIQTALKMQLAKDTVTSDVLQRAFNLYSSVLSGLTFKLLRRSFS
LKMRFSVADTTQLIYVPKVCDWAIPKQYLQAEGEIGIAARVVTESSPAKMVTEVEMKEPKAL
GHFMQQAPHDWYFDASLGGTQVAGRIVEKGKEVGKERKLVGYRMRGNSAYKTVLDKSLVGNT
ELSQCSMIIEIPYTQTVDADFRAQVQAGLPKVSINLPVKETITASNKDEQMLFDRFVAIDLG
ERGLGYAVFDAKTLELQESGHRPIKAITNLLNRTHHYEQRPNQRQKFQAKFNVNLSELRENT
VGDVCHQINRICAYYNAFPVLEYMVPDRLDKQLKSVYESVTNRYIWSSTDAHKSARVQFWLG
GETWEHPYLKSAKDKKPLVLSPGRGASGKGTSQTCSCCGRNPFDLIKDMKPRAKIAVVDGKA
KLENSELKLFERNLESKDDMLARRHRNERAGMEQPLTPGNYTVDEIKALLRANLRRAPKNRR
TKDTTVSEYHCVFSDCGKTMHADENAAVNIGGKFIADIEK
OspCas12c
MTKLRHRQKKLTHDWAGSKKREVLGSNGKLQNPLLMPVKKGQVTEFRKAFSAYARATKGEMT
DGRKNMFTHSFEPFKTKPSLHQCELADKAYQSLHSYLPGSLAHFLLSAHALGFRIFSKSGEA
TAFQASSKIEAYESKLASELACVDLSIQNLTISTLFNALTTSVRGKGEETSADPLIARFYTL
LTGKPLSRDTQGPERDLAEVISRKIASSFGTWKEMTANPLQSLQFFEEELHALDANVSLSPA
FDVLIKMNDLQGDLKNRTIVFDPDAPVFEYNAEDPADIIIKLTARYAKEAVIKNQNVGNYVK
NAITTTNANGLGWLLNKGLSLLPVSTDDELLEFIGVERSHPSCHALIELIAQLEAPELFEKN
VFSDTRSEVQGMIDSAVSNHIARLSSSRNSLSMDSEELERLIKSFQIHTPHCSLFIGAQSLS
QQLESLPEALQSGVNSADILLGSTQYMLTNSLVEESIATYQRTLNRINYLSGVAGQINGAIK
RKAIDGEKIHLPAAWSELISLPFIGQPVIDVESDLAHLKNQYQTLSNEFDTLISALQKNFDL
NFNKALLNRTQHFEAMCRSTKKNALSKPEIVSYRDLLARLTSCLYRGSLVLRRAGIEVLKKH
KIFESNSELREHVHERKHFVFVSPLDRKAKKLLRLTDSRPDLLHVIDEILQHDNLENKDRES
LWLVRSGYLLAGLPDQLSSSFINLPIITQKGDRRLIDLIQYDQINRDAFVMLVTSAFKSNLS
GLQYRANKQSFVVTRTLSPYLGSKLVYVPKDKDWLVPSQMFEGRFADILQSDYMVWKDAGRL
CVIDTAKHLSNIKKSVFSSEEVLAFLRELPHRTFIQTEVRGLGVNVDGIAFNNGDIPSLKTF
SNCVQVKVSRTNTSLVQTLNRWFEGGKVSPPSIQFERAYYKKDDQIHEDAAKRKIRFQMPAT
ELVHASDDAGWTPSYLLGIDPGEYGMGLSLVSINNGEVLDSGFIHINSLINFASKKSNHQTK
VVPRQQYKSPYANYLEQSKDSAAGDIAHILDRLIYKLNALPVFEALSGNSQSAADQVWTKVL
SFYTWGDNDAQNSIRKQHWFGASHWDIKGMLRQPPTEKKPKPYIAFPGSQVSSYGNSQRCSC
CGRNPIEQLREMAKDTSIKELKIRNSEIQLFDGTIKLFNPDPSTVIERRRHNLGPSRIPVAD
RTFKNISPSSLEFKELITIVSRSIRHSPEFIAKKRGIGSEYFCAYSDCNSSLNSEANAAANV
AQKFQKQLFFEL

[0416] In some embodiments, a napDNAbp refers to Cas12g, Cas12h, or Cas12i, which have been described in, for example, Yan et al., “Functionally Diverse Type V CRISPR-Cas Systems,” Science, 2019 Jan. 4; 363: 88-91; the entire contents of each is hereby incorporated by reference. By aggregating more than 10 terabytes of sequence data, new classifications of Type V Cas proteins were identified that showed weak similarity to previously characterized Class V protein, including Cas12g, Cas12h, and Cas12i. In some embodiments, the Cas12 protein is a Cas12g or a variant of Cas12g. In some embodiments, the Cas12 protein is a Cas12h or a variant of Cas12h. In some embodiments, the Cas12 protein is a Cas12i or a variant of Cas12i. It should be appreciated that other RNA-guided DNA binding proteins may be used as a napDNAbp, and are within the scope of this disclosure. In some embodiments, the napDNAbp comprises an amino acid sequence that is at least 85%, at least 90%, at least 91%, at least 92%, at least 93%, at least 94%, at least 95%, at least 96%, at least 97%, at least 98%, at least 99%, or at least 99.5% identical to a naturally-occurring Cas12g, Cas12h, or Cas12i protein. In some embodiments, the napDNAbp is a naturally-occurring Cas12g, Cas12h, or Cas12i protein. In some embodiments, the napDNAbp comprises an amino acid sequence that is at least 85%, at least 90%, at least 91%, at least 92%, at least 93%, at least 94%, at least 95%, at least 96%, at least 97%, at least 98%, at least 99%, or at ease 99.5% identical to any Cas12g, Cas12h, or Cas12i protein described herein. It should be appreciated that Cas12g, Cas12h, or Cas12i from other bacterial species may also be used in accordance with the present disclosure. In some embodiments, the Cas12i is a Cas12i1 or a Cas12i2.

Cas12g1
MAQASSTPAVSPRPRPRYREERTLVRKLLPRPGQSKQEFRENVKKLRKAFLQFNADVSGVCQ
WAIQFRPRYGKPAEPTETFWKFFLEPETSLPPNDSRSPEFRRLQAFEAAAGINGAAALDDPA
FTNELRDSILAVASRPKTKEAQRLFSRLKDYQPAHRMILAKVAAEWIESRYRRAHQNWERNY
EEWKKEKQEWEQNHPELTPEIREAFNQIFQQLEVKEKRVRICPAARLLQNKDNCQYAGKNKH
SVLCNQFNEFKKNHLQGKAIKFFYKDAEKYLRCGLQSLKPNVQGPFREDWNKYLRYMNLKEE
TLRGKNGGRLPHCKNLGQECEFNPHTALCKQYQQQLSSRPDLVQHDELYRKWRREYWREPRK
PVFRYPSVKRHSIAKIFGENYFQADFKNSVVGLRLDSMPAGQYLEFAFAPWPRNYRPQPGET
EISSVHLHFVGTRPRIGFRFRVPHKRSRFDCTQEELDELRSRTFPRKAQDQKFLEAARKRLL
ETFPGNAEQELRLLAVDLGTDSARAAFFIGKTFQQAFPLKIVKIEKLYEQWPNQKQAGDRRD
ASSKQPRPGLSRDHVGRHLQKMRAQASEIAQKRQELTGTPAPETTTDQAAKKATLQPFDLRG
LTVHTARMIRDWARLNARQIIQLAEENQVDLIVLESLRGFRPPGYENLDQEKKRRVAFFAHG
RIRRKVTEKAVERGMRVVTVPYLASSKVCAECRKKQKDNKQWEKNKKRGLFKCEGCGSQAQV
DENAARVLGRVFWGEIELPTAIP
Cas12h1
MKVHEIPRSQLLKIKQYEGSFVEWYRDLQEDRKKFASLLFRWAAFGYAAREDDGATYISPSQ
ALLERRLLLGDAEDVAIKFLDVLFKGGAPSSSCYSLFYEDFALRDKAKYSGAKREFIEGLAT
MPLDKIIERIRQDEQLSKIPAEEWLILGAEYSPEEIWEQVAPRIVNVDRSLGKQLRERLGIK
CRRPHDAGYCKILMEVVARQLRSHNETYHEYLNQTHEMKTKVANNLTNEFDLVCEFAEVLEE
KNYGLGWYVLWQGVKQALKEQKKPTKIQIAVDQLRQPKFAGLLTAKWRALKGAYDTWKLKKR
LEKRKAFPYMPNWDNDYQIPVGLTGLGVFTLEVKRTEVVVDLKEHGKLFCSHSHYFGDLTAE
KHPSRYHLKFRHKLKLRKRDSRVEPTIGPWIEAALREITIQKKPNGVFYLGLPYALSHGIDN
FQIAKRFFSAAKPDKEVINGLPSEMVVGAADLNLSNIVAPVKARIGKGLEGPLHALDYGYGE
LIDGPKILTPDGPRCGELISLKRDIVEIKSAIKEFKACQREGLTMSEETTTWLSEVESPSDS
PRCMIQSRIADTSRRLNSFKYQMNKEGYQDLAEALRLLDAMDSYNSLLESYQRMHLSPGEQS
PKEAKFDTKRASFRDLLRRRVAHTIVEYFDDCDIVFFEDLDGPSDSDSRNNALVKLLSPRTL
LLYIRQALEKRGIGMVEVAKDGTSQNNPISGHVGWRNKQNKSEIYFYEDKELLVMDADEVGA
MNILCRGLNHSVCPYSFVTKAPEKKNDEKKEGDYGKRVKRFLKDRYGSSNVRFLVASMGFVT
VTTKRPKDALVGKRLYYHGGELVTHDLHNRMKDEIKYLVEKEVLARRVSLSDSTIKSYKSFA
HV
Cas12i1
MSNKEKNASETRKAYTTKMIPRSHDRMKLLGNFMDYLMDGTPIFFELWNQFGGGIDRDIISG
TANKDKISDDLLLAVNWFKVMPINSKPQGVSPSNLANLFQQYSGSEPDIQAQEYFASNFDTE
KHQWKDMRVEYERLLAELQLSRSDMHHDLKLMYKEKCIGLSLSTAHYITSVMFGTGAKNNRQ
TKHQFYSKVIQLLEESTQINSVEQLASIILKAGDCDSYRKLRIRCSRKGATPSILKIVQDYE
LGTNHDDEVNVPSLIANLKEKLGRFEYECEWKCMEKIKAFLASKVGPYYLGSYSAMLENALS
PIKGMTTKNCKFVLKQIDAKNDIKYENEPFGKIVEGFFDSPYFESDTNVKWVLHPHHIGESN
IKTLWEDLNAIHSKYEEDIASLSEDKKEKRIKVYQGDVCQTINTYCEEVGKEAKTPLVQLLR
YLYSRKDDIAVDKIIDGITFLSKKHKVEKQKINPVIQKYPSFNFGNNSKLLGKIISPKDKLK
HNLKCNRNQVDNYIWIEIKVLNTKTMRWEKHHYALSSTRFLEEVYYPATSENPPDALAARFR
TKTNGYEGKPALSAEQIEQIRSAPVGLRKVKKRQMRLEAARQQNLLPRYTWGKDFNINICKR
GNNFEVTLATKVKKKKEKNYKVVLGYDANIVRKNTYAAIEAHANGDGVIDYNDLPVKPIESG
FVTVESQVRDKSYDQLSYNGVKLLYCKPHVESRRSFLEKYRNGTMKDNRGNNIQIDFMKDFE
AIADDETSLYYFNMKYCKLLQSSIRNHSSQAKEYREEIFELLRDGKLSVLKLSSLSNLSFVM
FKVAKSLIGTYFGHLLKKPKNSKSDVKAPPITDEDKQKADPEMFALRLALEEKRLNKVKSKK
EVIANKIVAKALELRDKYGPVLIKGENISDTTKKGKKSSTNSFLMDWLARGVANKVKEMVMM
HQGLEFVEVNPNFTSHQDPFVHKNPENTFRARYSRCTPSELTEKNRKEILSFLSDKPSKRPT
NAYYNEGAMAFLATYGLKKNDVLGVSLEKFKQIMANILHQRSEDQLLFPSRGGMFYLATYKL
DADATSVNWNGKQFWVCNADLVAAYNVGLVDIQKDFKKK
Cas12i2
MSSAIKSYKSVLRPNERKNQLLKSTIQCLEDGSAFFFKMLQGLFGGITPEIVRFSTEQEKQQ
QDIALWCAVNWFRPVSQDSLTHTIASDNLVEKFEEYYGGTASDAIKQYFSASIGESYYWNDC
RQQYYDLCRELGVEVSDLTHDLEILCREKCLAVATESNQNNSIISVLFGTGEKEDRSVKLRI
TKKILEAISNLKEIPKNVAPIQEIILNVAKATKETFRQVYAGNLGAPSTLEKFIAKDGQKEF
DLKKLQTDLKKVIRGKSKERDWCCQEELRSYVEQNTIQYDLWAWGEMFNKAHTALKIKSTRN
YNFAKQRLEQFKEIQSLNNLLVVKKLNDFFDSEFFSGEETYTICVHHLGGKDLSKLYKAWED
DPADPENAIVVLCDDLKNNFKKEPIRNILRYIFTIRQECSAQDILAAAKYNQQLDRYKSQKA
NPSVLGNQGFTWTNAVILPEKAQRNDRPNSLDLRIWLYLKLRHPDGRWKKHHIPFYDTRFFQ
EIYAAGNSPVDTCQFRTPRFGYHLPKLTDQTAIRVNKKHVKAAKTEARIRLAIQQGTLPVSN
LKITEISATINSKGQVRIPVKFDVGRQKGTLQIGDRFCGYDQNQTASHAYSLWEVVKEGQYH
KELGCFVRFISSGDIVSITENRGNQFDQLSYEGLAYPQYADWRKKASKFVSLWQITKKNKKK
EIVTVEAKEKFDAICKYQPRLYKFNKEYAYLLRDIVRGKSLVELQQIRQEIFRFIEQDCGVT
RLGSLSLSTLETVKAVKGIIYSYFSTALNASKNNPISDEQRKEFDPELFALLEKLELIRTRK
KKQKVERIANSLIQTCLENNIKFIRGEGDLSTTNNATKKKANSRSMDWLARGVFNKIRQLAP
MHNITLFGCGSLYTSHQDPLVHRNPDKAMKCRWAAIPVKDIGDWVLRKLSQNLRAKNIGTGE
YYHQGVKEFLSHYELQDLEEELLKWRSDRKSNIPCWVLQNRLAEKLGNKEAVVYIPVRGGRI
YFATHKVATGAVSIVFDQKQVWVCNADHVAAANIALTVKGIGEQSSDEENPDGSRIKLQLTS

[0417] Representative nucleic acid and protein sequences of the base editors follow:

[0418] For the sequences above, the Kozak sequence is bolded and underlined; marks the N-terminal nuclear localization signal (NLS); lower case characters denote the GGGSGGS linker; [symbol] marks the sequence encoding ABE8, unmodified sequence encodes BhCas12b; double underling denotes the Xten20 linker; single underlining denotes the C-terminal NLS; [symbol] denotes the GS linker; and italicized characters represent the coding sequence of the 3× hemagglutinin (HA) tag.

### Guide Polynucleotides

[0419] In an embodiment, the guide polynucleotide is a guide RNA. As used herein, the term “guide polynucleotide(s)” refer to a polynucleotide which can be specific for a target sequence and can form a complex with a polynucleotide programmable nucleotide binding domain protein (e.g., Cas9 or Cpf1). In an embodiment, the guide polynucleotide is a guide RNA. As used herein, the term “guide RNA (gRNA)” and its grammatical equivalents can refer to an RNA which can be specific for a target DNA and can form a complex with Cas protein. An RNA/Cas complex can assist in “guiding” Cas protein to a target DNA.

[0420] Cas9/crRNA/tracrRNA endonucleolytically cleaves linear or circular dsDNA target complementary to the spacer. The target strand not complementary to crRNA is first cut endonucleolytically, then trimmed 3′-5′ exonucleolytically. In nature, DNA-binding and cleavage typically requires protein and both RNAs. However, single guide RNAs (“sgRNA,” or simply “gRNA”) can be engineered so as to incorporate aspects of both the crRNA and tracrRNA into a single RNA species. See, e.g., Jinek M. et al., Science 337:816-821(2012), the entire contents of which is hereby incorporated by reference. Cas9 recognizes a short motif in the CRISPR repeat sequences (the PAM or protospacer adjacent motif) to help distinguish self versus non-self. Cas9 nuclease sequences and structures are well known to those of skill in the art (see e.g., “Complete genome sequence of an M1 strain of Streptococcus pyogenes.” Ferretti, J. J. et al., Natl. Acad. Sci. U.S.A. 98:4658-4663(2001); “CRISPR RNA maturation by trans-encoded small RNA and host factor RNase III.” Deltcheva E. et al., Nature 471:602-607(2011); and “Programmable dual-RNA-guided DNA endonuclease in adaptive bacterial immunity.” Jinek M. et al, Science 337:816-821(2012), the entire contents of each of which are incorporated herein by reference). Cas9 orthologs have been described in various species, including, but not limited to, S. pyogenes and S. thermophilus. Additional suitable Cas9 nucleases and sequences can be apparent to those of skill in the art based on this disclosure, and such Cas9 nucleases and sequences include Cas9 sequences from the organisms and loci disclosed in Chylinski, Rhun, and Charpentier, “The tracrRNA and Cas9 families of type II CRISPR-Cas immunity systems” (2013) RNA Biology 10:5, 726-737; the entire contents of which are incorporated herein by reference. In some embodiments, a Cas9 nuclease has an inactive (e.g., an inactivated) DNA cleavage domain, that is, the Cas9 is a nickase.

[0421] In some embodiments, the guide polynucleotide is at least one single guide RNA (“sgRNA” or “gRNA”). In some embodiments, the guide polynucleotide is at least one tracrRNA. In some embodiments, the guide polynucleotide does not require PAM sequence to guide the polynucleotide-programmable DNA-binding domain (e.g., Cas9 or Cpf1) to the target nucleotide sequence.

[0422] The polynucleotide programmable nucleotide binding domain (e.g., a CRISPR-derived domain) of the base editors disclosed herein can recognize a target polynucleotide sequence by associating with a guide polynucleotide. A guide polynucleotide (e.g., gRNA) is typically single-stranded and can be programmed to site-specifically bind (i.e., via complementary base pairing) to a target sequence of a polynucleotide, thereby directing a base editor that is in conjunction with the guide nucleic acid to the target sequence. A guide polynucleotide can be DNA. A guide polynucleotide can be RNA. In some embodiments, the guide polynucleotide comprises natural nucleotides (e.g., adenosine). In some embodiments, the guide polynucleotide comprises non-natural (or unnatural) nucleotides (e.g., peptide nucleic acid or nucleotide analogs). In some embodiments, the targeting region of a guide nucleic acid sequence can be at least 15, 16, 17, 18, 19, 20, 21, 22, 23, 24, 25, 26, 27, 28, 29, or 30 nucleotides in length. A targeting region of a guide nucleic acid can be between 10-30 nucleotides in length, or between 15-25 nucleotides in length, or between 15-20 nucleotides in length.

[0423] In some embodiments, a guide polynucleotide comprises two or more individual polynucleotides, which can interact with one another via for example complementary base pairing (e.g., a dual guide polynucleotide). For example, a guide polynucleotide can comprise a CRISPR RNA (crRNA) and a trans-activating CRISPR RNA (tracrRNA). For example, a guide polynucleotide can comprise one or more trans-activating CRISPR RNA (tracrRNA).

[0424] In type II CRISPR systems, targeting of a nucleic acid by a CRISPR protein (e.g., Cas9) typically requires complementary base pairing between a first RNA molecule (crRNA) comprising a sequence that recognizes the target sequence and a second RNA molecule (trRNA) comprising repeat sequences which forms a scaffold region that stabilizes the guide RNA-CRISPR protein complex. Such dual guide RNA systems can be employed as a guide polynucleotide to direct the base editors disclosed herein to a target polynucleotide sequence.

[0425] In some embodiments, the base editor provided herein utilizes a single guide polynucleotide (e.g., gRNA). In some embodiments, the base editor provided herein utilizes a dual guide polynucleotide (e.g., dual gRNAs). In some embodiments, the base editor provided herein utilizes one or more guide polynucleotide (e.g., multiple gRNA). In some embodiments, a single guide polynucleotide is utilized for different base editors described herein. For example, a single guide polynucleotide can be utilized for a cytidine base editor and an adenosine base editor.

[0426] In other embodiments, a guide polynucleotide can comprise both the polynucleotide targeting portion of the nucleic acid and the scaffold portion of the nucleic acid in a single molecule (i.e., a single-molecule guide nucleic acid). For example, a single-molecule guide polynucleotide can be a single guide RNA (sgRNA or gRNA). Herein the term guide polynucleotide sequence contemplates any single, dual or multi-molecule nucleic acid capable of interacting with and directing a base editor to a target polynucleotide sequence.

[0427] Typically, a guide polynucleotide (e.g., crRNA/trRNA complex or a gRNA) comprises a “polynucleotide-targeting segment” that includes a sequence capable of recognizing and binding to a target polynucleotide sequence, and a “protein-binding segment” that stabilizes the guide polynucleotide within a polynucleotide programmable nucleotide binding domain component of a base editor. In some embodiments, the polynucleotide targeting segment of the guide polynucleotide recognizes and binds to a DNA polynucleotide, thereby facilitating the editing of a base in DNA. In other embodiments, the polynucleotide targeting segment of the guide polynucleotide recognizes and binds to an RNA polynucleotide, thereby facilitating the editing of a base in RNA. Herein a “segment” refers to a section or region of a molecule, e.g., a contiguous stretch of nucleotides in the guide polynucleotide. A segment can also refer to a region/section of a complex such that a segment can comprise regions of more than one molecule. For example, where a guide polynucleotide comprises multiple nucleic acid molecules, the protein-binding segment of can include all or a portion of multiple separate molecules that are for instance hybridized along a region of complementarity. In some embodiments, a protein-binding segment of a DNA-targeting RNA that comprises two separate molecules can comprise (i) base pairs 40-75 of a first RNA molecule that is 100 base pairs in length; and (ii) base pairs 10-25 of a second RNA molecule that is 50 base pairs in length. The definition of “segment,” unless otherwise specifically defined in a particular context, is not limited to a specific number of total base pairs, is not limited to any particular number of base pairs from a given RNA molecule, is not limited to a particular number of separate molecules within a complex, and can include regions of RNA molecules that are of any total length and can include regions with complementarity to other molecules.

[0428] A guide RNA or a guide polynucleotide can comprise two or more RNAs, e.g., CRISPR RNA (crRNA) and transactivating crRNA (tracrRNA). A guide RNA or a guide polynucleotide can sometimes comprise a single-chain RNA, or single guide RNA (sgRNA) formed by fusion of a portion (e.g., a functional portion) of crRNA and tracrRNA. A guide RNA or a guide polynucleotide can also be a dual RNA comprising a crRNA and a tracrRNA. Furthermore, a crRNA can hybridize with a target DNA.

[0429] As discussed above, a guide RNA or a guide polynucleotide can be an expression product. For example, a DNA that encodes a guide RNA can be a vector comprising a sequence coding for the guide RNA. A guide RNA or a guide polynucleotide can be transferred into a cell by transfecting the cell with an isolated guide RNA or plasmid DNA comprising a sequence coding for the guide RNA and a promoter. A guide RNA or a guide polynucleotide can also be transferred into a cell in other way, such as using virus-mediated gene delivery.

[0430] A guide RNA or a guide polynucleotide can be isolated. For example, a guide RNA can be transfected in the form of an isolated RNA into a cell or organism. A guide RNA can be prepared by in vitro transcription using any in vitro transcription system known in the art. A guide RNA can be transferred to a cell in the form of isolated RNA rather than in the form of plasmid comprising encoding sequence for a guide RNA.

[0431] A guide RNA or a guide polynucleotide can comprise three regions: a first region at the 5′ end that can be complementary to a target site in a chromosomal sequence, a second internal region that can form a stem loop structure, and a third 3′ region that can be single-stranded. A first region of each guide RNA can also be different such that each guide RNA guides a fusion protein to a specific target site. Further, second and third regions of each guide RNA can be identical in all guide RNAs.

[0432] A first region of a guide RNA or a guide polynucleotide can be complementary to sequence at a target site in a chromosomal sequence such that the first region of the guide RNA can base pair with the target site. In some embodiments, a first region of a guide RNA can comprise from or from about 10 nucleotides to 25 nucleotides (i.e., from 10 nucleotides to nucleotides; or from about 10 nucleotides to about 25 nucleotides; or from 10 nucleotides to about 25 nucleotides; or from about 10 nucleotides to 25 nucleotides) or more. For example, a region of base pairing between a first region of a guide RNA and a target site in a chromosomal sequence can be or can be about 10, 11, 12, 13, 14, 15, 16, 17, 18, 19, 20, 22, 23, 24, 25, or more nucleotides in length. Sometimes, a first region of a guide RNA can be or can be about 19, 20, or 21 nucleotides in length.

[0433] A guide RNA or a guide polynucleotide can also comprise a second region that forms a secondary structure. For example, a secondary structure formed by a guide RNA can comprise a stem (or hairpin) and a loop. A length of a loop and a stem can vary. For example, a loop can range from or from about 3 to 10 nucleotides in length, and a stem can range from or from about 6 to 20 base pairs in length. A stem can comprise one or more bulges of 1 to 10 or about 10 nucleotides. The overall length of a second region can range from or from about 16 to 60 nucleotides in length. For example, a loop can be or can be about 4 nucleotides in length and a stem can be or can be about 12 base pairs.

[0434] A guide RNA or a guide polynucleotide can also comprise a third region at the 3′ end that can be essentially single-stranded. For example, a third region is sometimes not complementarity to any chromosomal sequence in a cell of interest and is sometimes not complementarity to the rest of a guide RNA. Further, the length of a third region can vary. A third region can be more than or more than about 4 nucleotides in length. For example, the length of a third region can range from or from about 5 to 60 nucleotides in length.

[0435] A guide RNA or a guide polynucleotide can target any exon or intron of a gene target. In some embodiments, a guide can target exon 1 or 2 of a gene; in other embodiments, a guide can target exon 3 or 4 of a gene. A composition can comprise multiple guide RNAs that all target the same exon or in some embodiments, multiple guide RNAs that can target different exons. An exon and an intron of a gene can be targeted.

[0436] A guide RNA or a guide polynucleotide can target a nucleic acid sequence of about 20 nucleotides. A target nucleic acid can be less than about 20 nucleotides. A target nucleic acid can be at least about 5, 10, 15, 16, 17, 18, 19, 20, 21, 22, 23, 24, 25, 30, or anywhere between 1-100 nucleotides in length. A target nucleic acid can be at most about 5, 10, 15, 16, 17, 18, 19, 20, 21, 22, 23, 24, 25, 30, 40, 50, or anywhere between 1-100 nucleotides in length. A target nucleic acid sequence can be about 20 bases immediately 5′ of the first nucleotide of the PAM. A guide RNA can target a nucleic acid sequence. A target nucleic acid can be at least about 1-10, 1-20, 1-30, 1-40, 1-50, 1-60, 1-70, 1-80, 1-90, or 1-100 nucleotides.

[0437] A guide polynucleotide, for example, a guide RNA, can refer to a nucleic acid that can hybridize to another nucleic acid, for example, the target nucleic acid or protospacer in a genome of a cell. A guide polynucleotide can be RNA. A guide polynucleotide can be DNA. The guide polynucleotide can be programmed or designed to bind to a sequence of nucleic acid site-specifically. A guide polynucleotide can comprise a polynucleotide chain and can be called a single guide polynucleotide. A guide polynucleotide can comprise two polynucleotide chains and can be called a double guide polynucleotide. A guide RNA can be introduced into a cell or embryo as an RNA molecule. For example, an RNA molecule can be transcribed in vitro and/or can be chemically synthesized. An RNA can be transcribed from a synthetic DNA molecule, e.g., a gBlocks® gene fragment. A guide RNA can then be introduced into a cell or embryo as an RNA molecule. A guide RNA can also be introduced into a cell or embryo in the form of a non-RNA nucleic acid molecule, e.g., a DNA molecule. For example, a DNA encoding a guide RNA can be operably linked to promoter control sequence for expression of the guide RNA in a cell or embryo of interest. An RNA coding sequence can be operably linked to a promoter sequence that is recognized by RNA polymerase III (Pol III). Plasmid vectors that can be used to express guide RNA include, but are not limited to, px330 vectors and px333 vectors. In some embodiments, a plasmid vector (e.g., px333 vector) can comprise at least two guide RNA-encoding DNA sequences.

[0438] Methods for selecting, designing, and validating guide polynucleotides, e.g., guide RNAs and targeting sequences are described herein and known to those skilled in the art. For example, to minimize the impact of potential substrate promiscuity of a deaminase domain in the nucleobase editor system (e.g., an AID domain), the number of residues that could unintentionally be targeted for deamination (e.g., off-target C residues that could potentially reside on ssDNA within the target nucleic acid locus) may be minimized. In addition, software tools can be used to optimize the gRNAs corresponding to a target nucleic acid sequence, e.g., to minimize total off-target activity across the genome. For example, for each possible targeting domain choice using S. pyogenes Cas9, all off-target sequences (preceding selected PAMs, e.g., NAG or NGG) may be identified across the genome that contain up to certain number (e.g., 1, 2, 3, 4, 5, 6, 7, 8, 9, or 10) of mismatched base-pairs. First regions of gRNAs complementary to a target site can be identified, and all first regions (e.g., crRNAs) can be ranked according to its total predicted off-target score; the top-ranked targeting domains represent those that are likely to have the greatest on-target and the least off-target activity. Candidate gRNAs can be functionally evaluated by using methods known in the art and/or as set forth herein.

[0439] As a non-limiting example, target DNA hybridizing sequences in crRNAs of a guide RNA for use with Cas9s may be identified using a DNA sequence searching algorithm. gRNA design may be carried out using custom gRNA design software based on the public tool cas-offinder as described in Bae S., Park J., & Kim J.-S. Cas-OFFinder: A fast and versatile algorithm that searches for potential off-target sites of Cas9 RNA-guided endonucleases. Bioinformatics 30, 1473-1475 (2014). This software scores guides after calculating their genome-wide off-target propensity. Typically matches ranging from perfect matches to 7 mismatches are considered for guides ranging in length from 17 to 24. Once the off-target sites are computationally-determined, an aggregate score is calculated for each guide and summarized in a tabular output using a web-interface. In addition to identifying potential target sites adjacent to PAM sequences, the software also identifies all PAM adjacent sequences that differ by 1, 2, 3 or more than 3 nucleotides from the selected target sites. Genomic DNA sequences for a target nucleic acid sequence, e.g., a target gene may be obtained and repeat elements may be screened using publicly available tools, for example, the RepeatMasker program. RepeatMasker searches input DNA sequences for repeated elements and regions of low complexity. The output is a detailed annotation of the repeats present in a given query sequence.

[0440] Following identification, first regions of guide RNAs, e.g., crRNAs, may be ranked into tiers based on their distance to the target site, their orthogonality and presence of 5′ nucleotides for close matches with relevant PAM sequences (for example, a 5′ G based on identification of close matches in the human genome containing a relevant PAM e.g., NGG PAM for S. pyogenes, NNGRRT or NNGRRV PAM for S. aureus). As used herein, orthogonality refers to the number of sequences in the human genome that contain a minimum number of mismatches to the target sequence. A “high level of orthogonality” or “good orthogonality” may, for example, refer to 20-mer targeting domains that have no identical sequences in the human genome besides the intended target, nor any sequences that contain one or two mismatches in the target sequence. Targeting domains with good orthogonality may be selected to minimize off-target DNA cleavage.

[0441] In some embodiments, a reporter system may be used for detecting base-editing activity and testing candidate guide polynucleotides. In some embodiments, a reporter system may comprise a reporter gene based assay where base editing activity leads to expression of the reporter gene. For example, a reporter system may include a reporter gene comprising a deactivated start codon, e.g., a mutation on the template strand from 3′-TAC-5′ to 3′-CAC-5′. Upon successful deamination of the target C, the corresponding mRNA will be transcribed as 5′-AUG-3′ instead of 5′-GUG-3′, enabling the translation of the reporter gene. Suitable reporter genes will be apparent to those of skill in the art. Non-limiting examples of reporter genes include gene encoding green fluorescence protein (GFP), red fluorescence protein (RFP), luciferase, secreted alkaline phosphatase (SEAP), or any other gene whose expression are detectable and apparent to those skilled in the art. The reporter system can be used to test many different gRNAs, e.g., in order to determine which residue(s) with respect to the target DNA sequence the respective deaminase will target. sgRNAs that target non-template strand can also be tested in order to assess off-target effects of a specific base editing protein, e.g., a Cas9 deaminase fusion protein. In some embodiments, such gRNAs can be designed such that the mutated start codon will not be base-paired with the gRNA. The guide polynucleotides can comprise standard ribonucleotides, modified ribonucleotides (e.g., pseudouridine), ribonucleotide isomers, and/or ribonucleotide analogs. In some embodiments, the guide polynucleotide can comprise at least one detectable label. The detectable label can be a fluorophore (e.g., FAM, TMR, Cy3, Cy5, Texas Red, Oregon Green, Alexa Fluors, Halo tags, or suitable fluorescent dye), a detection tag (e.g., biotin, digoxigenin, and the like), quantum dots, or gold particles.

[0442] The guide polynucleotides can be synthesized chemically, synthesized enzymatically, or a combination thereof. For example, the guide RNA can be synthesized using standard phosphoramidite-based solid-phase synthesis methods. Alternatively, the guide RNA can be synthesized in vitro by operably linking DNA encoding the guide RNA to a promoter control sequence that is recognized by a phage RNA polymerase. Examples of suitable phage promoter sequences include T7, T3, SP6 promoter sequences, or variations thereof. In embodiments in which the guide RNA comprises two separate molecules (e.g., crRNA and tracrRNA), the crRNA can be chemically synthesized and the tracrRNA can be enzymatically synthesized.

[0443] In some embodiments, a base editor system may comprise multiple guide polynucleotides, e.g., gRNAs. For example, the gRNAs may target to one or more target loci (e.g., at least 1 gRNA, at least 2 gRNA, at least 5 gRNA, at least 10 gRNA, at least 20 gRNA, at least 30 g RNA, at least 50 gRNA) comprised in a base editor system. The multiple gRNA sequences can be tandemly arranged and are preferably separated by a direct repeat.

[0444] A DNA sequence encoding a guide RNA or a guide polynucleotide can also be part of a vector. Further, a vector can comprise additional expression control sequences (e.g., enhancer sequences, Kozak sequences, polyadenylation sequences, transcriptional termination sequences, etc.), selectable marker sequences (e.g., GFP or antibiotic resistance genes such as puromycin), origins of replication, and the like. A DNA molecule encoding a guide RNA can also be linear. A DNA molecule encoding a guide RNA or a guide polynucleotide can also be circular.

[0445] In some embodiments, one or more components of a base editor system may be encoded by DNA sequences. Such DNA sequences may be introduced into an expression system, e.g., a cell, together or separately. For example, DNA sequences encoding a polynucleotide programmable nucleotide binding domain and a guide RNA may be introduced into a cell, each DNA sequence can be part of a separate molecule (e.g., one vector containing the polynucleotide programmable nucleotide binding domain coding sequence and a second vector containing the guide RNA coding sequence) or both can be part of a same molecule (e.g., one vector containing coding (and regulatory) sequence for both the polynucleotide programmable nucleotide binding domain and the guide RNA).

[0446] A guide polynucleotide can comprise one or more modifications to provide a nucleic acid with a new or enhanced feature. A guide polynucleotide can comprise a nucleic acid affinity tag. A guide polynucleotide can comprise synthetic nucleotide, synthetic nucleotide analog, nucleotide derivatives, and/or modified nucleotides.

[0447] In some embodiments, a gRNA or a guide polynucleotide can comprise modifications. A modification can be made at any location of a gRNA or a guide polynucleotide. More than one modification can be made to a single gRNA or a guide polynucleotide. A gRNA or a guide polynucleotide can undergo quality control after a modification. In some embodiments, quality control can include PAGE, HPLC, MS, or any combination thereof.

[0448] A modification of a gRNA or a guide polynucleotide can be a substitution, insertion, deletion, chemical modification, physical modification, stabilization, purification, or any combination thereof.

[0449] A gRNA or a guide polynucleotide can also be modified by 5′adenylate, 5′ guanosine-triphosphate cap, 5′N7-Methylguanosine-triphosphate cap, 5′triphosphate cap, 3′phosphate, 3′thiophosphate, 5′phosphate, 5′thiophosphate, Cis-Syn thymidine dimer, trimers, C12 spacer, C3 spacer, C6 spacer, dSpacer, PC spacer, rSpacer, Spacer 18, Spacer 9,3′-3′ modifications, 5′-5′ modifications, abasic, acridine, azobenzene, biotin, biotin BB, biotin TEG, cholesteryl TEG, desthiobiotin TEG, DNP TEG, DNP-X, DOTA, dT-Biotin, dual biotin, PC biotin, psoralen C2, psoralen C6, TINA, 3′DABCYL, black hole quencher 1, black hole quencher 2, DABCYL SE, dT-DABCYL, IRDye QC-1, QSY-21, QSY-35, QSY-7, QSY-9, carboxyl linker, thiol linkers, 2′-deoxyribonucleoside analog purine, 2′-deoxyribonucleoside analog pyrimidine, ribonucleoside analog, 2′-O-methyl ribonucleoside analog, sugar modified analogs, wobble/universal bases, fluorescent dye label, 2′-fluoro RNA, 2′-O-methyl RNA, methylphosphonate, phosphodiester DNA, phosphodiester RNA, phosphothioate DNA, phosphorothioate RNA, UNA, pseudouridine-5′-triphosphate, 5′-methylcytidine-5′-triphosphate, or any combination thereof.

[0450] In some embodiments, a modification is permanent. In other embodiments, a modification is transient. In some embodiments, multiple modifications are made to a gRNA or a guide polynucleotide. A gRNA or a guide polynucleotide modification can alter physiochemical properties of a nucleotide, such as their conformation, polarity, hydrophobicity, chemical reactivity, base-pairing interactions, or any combination thereof.

[0451] The PAM sequence can be any PAM sequence known in the art. Suitable PAM sequences include, but are not limited to, NGG, NGA, NGC, NGN, NGT, NGCG, NGAG, NGAN, NGNG, NGCN, NGCG, NGTN, NNGRRT, NNNRRT, NNGRR(N), TTTV, TYCV, TYCV, TATV, NNNNGATT, NNAGAAW, or NAAAAC. Y is a pyrimidine; N is any nucleotide base; W is A or T.

[0452] A modification can also be a phosphorothioate substitute. In some embodiments, a natural phosphodiester bond can be susceptible to rapid degradation by cellular nucleases and; a modification of internucleotide linkage using phosphorothioate (PS) bond substitutes can be more stable towards hydrolysis by cellular degradation. A modification can increase stability in a gRNA or a guide polynucleotide. A modification can also enhance biological activity. In some embodiments, a phosphorothioate enhanced RNA gRNA can inhibit RNase A, RNase T1, calf serum nucleases, or any combinations thereof. These properties can allow the use of PS-RNA gRNAs to be used in applications where exposure to nucleases is of high probability in vivo or in vitro. For example, phosphorothioate (PS) bonds can be introduced between the last 3-5 nucleotides at the 5′- or ″-end of a gRNA which can inhibit exonuclease degradation. In some embodiments, phosphorothioate bonds can be added throughout an entire gRNA to reduce attack by endonucleases.

[0453] Different Cas12b orthologs (e.g., BhCas12b, BvCas12b, and AaCas12b) use different scaffold sequences (also referred to as tracrRNA). In some embodiments, the scaffold sequence is optimized for use with a BhCas12b protein and has the following sequence: (where the T's are replaced by uridines (U's) in the actual gRNA). BhCas12b sgRNA scaffold (underlined)+20 nt to 23 nt guide sequence (denoted by Ns).

5′GTTCTGTCTTTTGGTCAGGACAACCGTCTAGCTATAAGTGCTGCAGGG
TGTGAGAAACTCCTATTGCTGGACGATGTCTCTTACGAGGCATTAGCACN
NNNNNNNNNNNNNNNNNNN-3′

[0454] In some embodiments, the scaffold sequence is optimized for use with a BvCas12b protein and has the following sequence: (where the T's are replaced by uridines (U's) in the actual gRNA).

[0455] BvCas12b sgRNA Scaffold (Underlined)+20 nt to 23 nt Guide Sequence (Denoted by Ns)

5′GACCTATAGGGTCAATGAATCTGTGCGTGTGCCATAAGTAATTAAAAA
TTACCCACCACAGGAGCACCTGAAAACAGGTGCTTGGCACNNNNNNNNNN
NNNNNNNNNN-3′

[0456] In some embodiments, the scaffold sequence is optimized for use with a AaCas12b protein and has the following sequence: (where the T's are replaced by uridines (U's) in the actual gRNA).

AaCas12b sgRNA Scaffold (Underlined)+20 nt to 23 nt Guide Sequence (Denoted by Ns)

5′GTCTAAAGGACAGAATTTTTCAACGGGTGTGCCAATGGCCACTTTCCA
GGTGGCAAAGCCCGTTGACTTCTCAAAAAGAACGATCTGAGAAGTGGCAC
NNNNNNNNNNNNNNNNNNNN-3′

[0457] Thus, a skilled artisan can change the genomic target of the Cas protein specificity is partially determined by how specific the gRNA targeting sequence is for the genomic target compared to the rest of the genome.

### Protospacer Adjacent Motif

[0458] The term “protospacer adjacent motif (PAM)” or PAM-like motif refers to a 2-6 base pair DNA sequence immediately following the DNA sequence targeted by the Cas9 nuclease in the CRISPR bacterial adaptive immune system. In some embodiments, the PAM can be a 5′ PAM (i.e., located upstream of the 5′ end of the protospacer). In other embodiments, the PAM can be a 3′ PAM (i.e., located downstream of the 5′ end of the protospacer).

[0459] The PAM sequence is essential for target binding, but the exact sequence depends on a type of Cas protein.

[0460] A base editor provided herein can comprise a CRISPR protein-derived domain that is capable of binding a nucleotide sequence that contains a canonical or non-canonical protospacer adjacent motif (PAM) sequence. A PAM site is a nucleotide sequence in proximity to a target polynucleotide sequence. Some aspects of the disclosure provide for base editors comprising all or a portion of CRISPR proteins that have different PAM specificities.

[0461] For example, typically Cas9 proteins, such as Cas9 from S. pyogenes (spCas9), require a canonical NGG PAM sequence to bind a particular nucleic acid region, where the “N” in “NGG” is adenine (A), thymine (T), guanine (G), or cytosine (C), and the G is guanine. A PAM can be CRISPR protein-specific and can be different between different base editors comprising different CRISPR protein-derived domains. A PAM can be 5′ or 3′ of a target sequence. A PAM can be upstream or downstream of a target sequence. A PAM can be 1, 2, 3, 4, 5, 6, 7, 8, 9, 10 or more nucleotides in length. Often, a PAM is between 2-6 nucleotides in length. Several PAM variants are described in Table 1 below.

TABLE 1
Cas9 proteins and corresponding PAM sequences

| Variant | PAM |
|---|---|
| spCas9 | NGG |
| spCas9-VRQR | NGA |
| spCas9-VRER | NGCG |
| xCas9 (sp) | NGN |
| saCas9 | NNGRRT |
| saCas9-KKH | NNNRRT |
| spCas9-MQKSER | NGCG |
| spCas9-MQKSER | NGCN |
| spCas9-LRKIQK | NGTN |
| spCas9-LRVSQK | NGTN |
| spCas9-LRVSQL | NGTN |
| spCas9-MQKFRAER | NGC |
| Cpf1 | 5′ (TTTV) |
| SpyMac | 5′-NAA-3′ |

[0462] In some embodiments, the PAM is NGC. In some embodiments, the NGC PAM is recognized by a Cas9 variant. In some embodiments, the NGC PAM variant includes one or more amino acid substitutions selected from D1135M, S1136Q, G1218K, E1219F, A1322R, D1332A, R1335E, and T1337R (collectively termed “MQKFRAER”).

[0463] In some embodiments, the PAM is NGT. In some embodiments, the NGT PAM is recognized by a Cas9 variant. In some embodiments, the NGT PAM variant is generated through targeted mutations at one or more residues 1335, 1337, 1135, 1136, 1218, and/or 1219. In some embodiments, the NGT PAM variant is created through targeted mutations at one or more residues 1219, 1335, 1337, 1218. In some embodiments, the NGT PAM variant is created through targeted mutations at one or more residues 1135, 1136, 1218, 1219, and 1335. In some embodiments, the NGT PAM variant is selected from the set of targeted mutations provided in Table 2 and Table 3 below.

TABLE 2
NGT PAM Variant Mutations at residues
1219, 1335, 1337, 1218

| Variant | E1219V | R1335Q | T1337 | G1218 |
|---|---|---|---|---|
| 1 | F | V | T | |
| 2 | F | V | R | |
| 3 | F | V | Q | |
| 4 | F | V | L | |
| 5 | F | V | T | R |
| 6 | F | V | R | R |
| 7 | F | V | Q | R |
| 8 | F | V | L | R |
| 9 | L | L | T | |
| 10 | L | L | R | |
| 11 | L | L | Q | |
| 12 | L | L | L | |
| 13 | F | I | T | |
| 14 | F | I | R | |
| 15 | F | I | Q | |
| 16 | F | I | L | |
| 17 | F | G | C | |
| 18 | H | L | N | |
| 19 | F | G | C | A |
| 20 | H | L | N | V |
| 21 | L | A | W | |
| 22 | L | A | F | |
| 23 | L | A | Y | |
| 24 | I | A | W | |
| 25 | I | A | F | |
| 26 | I | A | Y | |

TABLE 3
NGT PAM Variant Mutations at residues
1135, 1136, 1218, 1219, and 1335

| Variant | D1135L | S1136R | G1218S | E1219V | R1335Q |
|---|---|---|---|---|---|
| 27 | G | | | | |
| 28 | V | | | | |
| 29 | I | | | | |
| 30 | | A | | | |
| 31 | | W | | | |
| 32 | | H | | | |
| 33 | | K | | | |
| 34 | | | K | | |
| 35 | | | R | | |
| 36 | | | Q | | |
| 37 | | | T | | |
| 38 | | | N | | |
| 39 | | | | I | |
| 40 | | | | A | |
| 41 | | | | N | |
| 42 | | | | Q | |
| 43 | | | | G | |
| 44 | | | | L | |
| 45 | | | | S | |
| 46 | | | | T | |
| 47 | | | | | L |
| 48 | | | | | I |
| 49 | | | | | V |
| 50 | | | | | N |
| 51 | | | | | S |
| 52 | | | | | T |
| 53 | | | | | F |
| 54 | | | | | Y |
| 55 | N1286Q | I1331F | | | |

[0464] In some embodiments, the NGT PAM variant is selected from variant 5, 7, 28, 31, or 36 in Tables 2 and 3. In some embodiments, the variants have improved NGT PAM recognition.

[0465] In some embodiments, the NGT PAM variants have mutations at residues 1219, 1335, 1337, and/or 1218. In some embodiments, the NGT PAM variant is selected with mutations for improved recognition from the variants provided in Table 4 below.

TABLE 4
NGT PAM Variant Mutations at residues
1219, 1335, 1337, and 1218

| Variant | E1219V | R1335Q | T1337 | G1218 |
|---|---|---|---|---|
| 1 | F | V | T | |
| 2 | F | V | R | |
| 3 | F | V | Q | |
| 4 | F | V | L | |
| 5 | F | V | T | R |
| 6 | F | V | R | R |
| 7 | F | V | Q | R |
| 8 | F | V | L | R |

[0466] In some embodiments, base editors with specificity for NGT PAM may be generated as provided in Table 5A below.

TABLE 5A
NGT PAM variants

| | NGTN variant | D1135 | S1136 | G1218 | E1219 | A1322R | R1335 | T1337 |
|---|---|---|---|---|---|---|---|---|
| Variant 1 | LRKIQK | L | R | K | I | — | Q | K |
| Variant 2 | LRSVQK | L | R | S | V | — | Q | K |
| Variant 3 | LRSVQL | L | R | S | V | — | Q | L |
| Variant 4 | LRKIRQK | L | R | K | I | R | Q | K |
| Variant 5 | LRSVRQK | L | R | S | V | R | Q | K |
| Variant 6 | LRSVRQL | L | R | S | V | R | Q | L |

[0467] In some embodiments the NGTN variant is variant 1. In some embodiments, the NGTN variant is variant 2. In some embodiments, the NGTN variant is variant 3. In some embodiments, the NGTN variant is variant 4. In some embodiments, the NGTN variant is variant 5. In some embodiments, the NGTN variant is variant 6.

[0468] In some embodiments, the Cas9 domain is a Cas9 domain from Streptococcus pyogenes (SpCas9). In some embodiments, the SpCas9 domain is a nuclease active SpCas9, a nuclease inactive SpCas9 (SpCas9d), or a SpCas9 nickase (SpCas9n). In some embodiments, the SpCas9 comprises a D9X mutation, or a corresponding mutation in any of the amino acid sequences provided herein, wherein X is any amino acid except for D. In some embodiments, the SpCas9 comprises a D9A mutation, or a corresponding mutation in any of the amino acid sequences provided herein. In some embodiments, the SpCas9 domain, the SpCas9d domain, or the SpCas9n domain can bind to a nucleic acid sequence having a non-canonical PAM. In some embodiments, the SpCas9 domain, the SpCas9d domain, or the SpCas9n domain can bind to a nucleic acid sequence having an NGG, a NGA, or a NGCG PAM sequence. In some embodiments, the SpCas9 domain comprises one or more of a D1135X, a R1335X, and a T1337X mutation, or a corresponding mutation in any of the amino acid sequences provided herein, wherein X is any amino acid. In some embodiments, the SpCas9 domain comprises one or more of a D1135E, R1335Q, and T1337R mutation, or a corresponding mutation in any of the amino acid sequences provided herein. In some embodiments, the SpCas9 domain comprises a D1135E, a R1335Q, and a T1337R mutation, or corresponding mutations in any of the amino acid sequences provided herein. In some embodiments, the SpCas9 domain comprises one or more of a D1135X, a R1335X, and a T1337X mutation, or a corresponding mutation in any of the amino acid sequences provided herein, wherein X is any amino acid. In some embodiments, the SpCas9 domain comprises one or more of a D1135V, a R1335Q, and a T1337R mutation, or a corresponding mutation in any of the amino acid sequences provided herein. In some embodiments, the SpCas9 domain comprises a D1135V, a R1335Q, and a T1337R mutation, or corresponding mutations in any of the amino acid sequences provided herein. In some embodiments, the SpCas9 domain comprises one or more of a D1135X, a G1218X, a R1335X, and a T1337X mutation, or a corresponding mutation in any of the amino acid sequences provided herein, wherein X is any amino acid. In some embodiments, the SpCas9 domain comprises one or more of a D1135V, a G1218R, a R1335Q, and a T1337R mutation, or a corresponding mutation in any of the amino acid sequences provided herein. In some embodiments, the SpCas9 domain comprises a D1135V, a G1218R, a R1335Q, and a T1337R mutation, or corresponding mutations in any of the amino acid sequences provided herein.

[0469] In some embodiments, the Cas9 domains of any of the fusion proteins provided herein comprises an amino acid sequence that is at least 60%, at least 65%, at least 70%, at least 75%, at least 80%, at least 85%, at least 90%, at least 95%, at least 96%, at least 97%, at least 98%, at least 99%, or at least 99.5% identical to a Cas9 polypeptide described herein. In some embodiments, the Cas9 domains of any of the fusion proteins provided herein comprises the amino acid sequence of any Cas9 polypeptide described herein. In some embodiments, the Cas9 domains of any of the fusion proteins provided herein consists of the amino acid sequence of any Cas9 polypeptide described herein.

[0470] In some examples, a PAM recognized by a CRISPR protein-derived domain of a base editor disclosed herein can be provided to a cell on a separate oligonucleotide to an insert (e.g., an AAV insert) encoding the base editor. In such embodiments, providing PAM on a separate oligonucleotide can allow cleavage of a target sequence that otherwise would not be able to be cleaved, because no adjacent PAM is present on the same polynucleotide as the target sequence.

[0471] In an embodiment, S. pyogenes Cas9 (SpCas9) can be used as a CRISPR endonuclease for genome engineering. However, others can be used. In some embodiments, a different endonuclease can be used to target certain genomic targets. In some embodiments, synthetic SpCas9-derived variants with non-NGG PAM sequences can be used. Additionally, other Cas9 orthologues from various species have been identified and these “non-SpCas9s” can bind a variety of PAM sequences that can also be useful for the present disclosure. For example, the relatively large size of SpCas9 (approximately 4 kb coding sequence) can lead to plasmids carrying the SpCas9 cDNA that cannot be efficiently expressed in a cell. Conversely, the coding sequence for Staphylococcus aureus Cas9 (SaCas9) is approximately 1 kilobase shorter than SpCas9, possibly allowing it to be efficiently expressed in a cell. Similar to SpCas9, the SaCas9 endonuclease is capable of modifying target genes in mammalian cells in vitro and in mice in vivo. In some embodiments, a Cas protein can target a different PAM sequence. In some embodiments, a target gene can be adjacent to a Cas9 PAM, 5′-NGG, for example. In other embodiments, other Cas9 orthologs can have different PAM requirements. For example, other PAMs such as those of S. thermophilus (5′-NNAGAA for CRISPR1 and 5′-NGGNG for CRISPR3) and Neisseria meningitidis (5′-NNNNGATT) can also be found adjacent to a target gene.

[0472] In some embodiments, for a S. pyogenes system, a target gene sequence can precede (i.e., be 5′ to) a 5′-NGG PAM, and a 20-nt guide RNA sequence can base pair with an opposite strand to mediate a Cas9 cleavage adjacent to a PAM. In some embodiments, an adjacent cut can be or can be about 3 base pairs upstream of a PAM. In some embodiments, an adjacent cut can be or can be about 10 base pairs upstream of a PAM. In some embodiments, an adjacent cut can be or can be about 0-20 base pairs upstream of a PAM. For example, an adjacent cut can be next to, 1, 2, 3, 4, 5, 6, 7, 8, 9, 10, 11, 12, 13, 14, 15, 16, 17, 18, 19, 20, 21, 22, 23, 24, 25, 26, 27, 28, 29, or 30 base pairs upstream of a PAM. An adjacent cut can also be downstream of a PAM by 1 to 30 base pairs.

[0473] In some embodiments, the Cas9 is a Cas9 variant having specificity for an altered PAM sequence. In some embodiments, the Additional Cas9 variants and PAM sequences are described in Miller et al., Continuous evolution of SpCas9 variants compatible with non-G PAMs. Nat Biotechnol (2020). https://doi.org/10.1038/s41587-020-0412-8, the entirety of which is incorporated herein by reference. in some embodiments, a Cas9 variate have no specific PAM requirements. In some embodiments, a Cas9 variant, e.g. a SpCas9 variant has specificity for a NRNH PAM, wherein R is A or G and H is A, C, or T. In some embodiments, the SpCas9 variant has specificity for a PAM sequence AAA, TAA, CAA, GAA, TAT, GAT, or CAC. In some embodiments, the SpCas9 variant comprises an amino acid substitution at position 1114, 1134, 1135, 1137, 1139, 1151, 1180, 1188, 1211, 1218, 1219, 1221, 1249, 1256, 1264, 1290, 1318, 1317, 1320, 1321, 1323, 1332, 1333, 1335, 1337, or 1339 as numbered in SEQ ID NO: 1 or a corresponding position thereof. In some embodiments, the SpCas9 variant comprises an amino acid substitution at position 1114, 1135, 1218, 1219, 1221, 1249, 1320, 1321, 1323, 1332, 1333, 1335, or 1337 as numbered in SEQ ID NO: 1 or a corresponding position thereof. In some embodiments, the SpCas9 variant comprises an amino acid substitution at position 1114, 1134, 1135, 1137, 1139, 1151, 1180, 1188, 1211, 1219, 1221, 1256, 1264, 1290, 1318, 1317, 1320, 1323, 1333 as numbered in SEQ ID NO: 1 or a corresponding position thereof. In some embodiments, the SpCas9 variant comprises an amino acid substitution at position 1114, 1131, 1135, 1150, 1156, 1180, 1191, 1218, 1219, 1221, 1227, 1249, 1253, 1286, 1293, 1320, 1321, 1332, 1335, 1339 as numbered in SEQ ID NO: 1 or a corresponding position thereof. In some embodiments, the SpCas9 variant comprises an amino acid substitution at position 1114, 1127, 1135, 1180, 1207, 1219, 1234, 1286, 1301, 1332, 1335, 1337, 1338, 1349 as numbered in SEQ ID NO: 1 or a corresponding position thereof. Exemplary amino acid substitutions and PAM specificity of SpCas9 variants are shown in Tables 5B, 5C, 5D, and 5E below.

TABLE 5B
SpCas9 amino acid substitutions and PAMs.

| | SpCas9 amino acid position | | | | | | | | | | | | |
|---|---|---|---|---|---|---|---|---|---|---|---|---|---|
| SpCas9/ | 1114 | 1135 | 1218 | 1219 | 1221 | 1249 | 1320 | 1321 | 1323 | 1332 | 1333 | 1335 | 1337 |
| PAM | R | D | G | E | Q | P | A | P | A | D | R | R | T |
| AAA | | N | | V | H | | | | | | G | | |
| AAA | | N | | V | H | | | | | | G | | |
| AAA | | | | V | | | | | | | G | | |
| TAA | G | N | | V | | | | | | | I | | |
| TAA | | N | | V | | | | | | | I | | A |
| TAA | G | N | | V | | | | | | | I | | A |
| CAA | | | | V | | | | | | | K | | |
| CAA | | N | | V | | | | | | | K | | |
| CAA | | N | | V | | | | | | | K | | |
| GAA | | | | V | H | | V | | | | K | | |
| GAA | | N | | V | | | V | | | | K | | |
| GAA | | | | V | H | | V | | | | K | | |
| TAT | | | S | V | H | S | | S | | | | L | |
| TAT | | | S | V | H | S | | S | | | | L | |
| TAT | | | S | V | H | S | | S | | | | L | |
| GAT | | | | V | | | | | | | I | | |
| GAT | | | | V | | | | | D | | | Q | |
| GAT | | | | V | | | | | D | | | Q | |
| CAC | | | | V | | | | | | N | | Q | N |
| CAC | | N | | V | | | | | | | | Q | N |
| CAC | | | | V | | | | | | N | | Q | N |

TABLE 5C
SpCas9 amino acid substitutions and PAMs.

| | SpCas9 amino acid position | | | | | | | | | | | | | | | | | | |
|---|---|---|---|---|---|---|---|---|---|---|---|---|---|---|---|---|---|---|---|
| SpCas9/ | 1114 | 1134 | 1135 | 1137 | 1139 | 1151 | 1180 | 1188 | 1211 | 1219 | 1221 | 1256 | 1264 | 1290 | 1318 | 1317 | 1320 | 1323 | 1333 |
| PAM | R | F | D | P | V | K | D | K | K | E | Q | Q | H | V | L | N | A | A | R |
| GAA | | | | | | | | | | V | H | | | | | | V | | K |
| GAA | | | N | S | | | | | | V | | | | | | | V | D | K |
| GAA | | | N | | | | | | | V | H | | Y | | | | V | | K |
| CAA | | | N | | | | | | | V | H | | Y | | | | V | | K |
| CAA | G | | N | S | | | | | | V | H | | Y | | | | V | | K |
| CAA | | | N | | | | | R | | V | H | | | | | | V | | K |
| CAA | | | N | | | | G | | R | V | H | | Y | | | | V | | K |
| CAA | | | N | | | | | | | V | H | | Y | | | | V | | K |
| AAA | | | N | | | | G | | | V | H | R | Y | | | | V | D | K |
| CAA | G | | N | | | | G | | | V | H | | Y | | | | V | D | K |
| CAA | | L | N | | | | G | | | V | H | | Y | | | T | V | D | K |
| TAA | G | | N | | | | G | | | V | H | | Y | G | S | | V | D | K |
| TAA | G | | N | | | E | G | | | V | H | | Y | | S | | V | | K |
| TAA | G | | N | | | | G | | | V | H | | Y | | S | | V | D | K |
| TAA | G | | N | | | | G | | R | V | H | | | | | | V | | K |
| TAA | | | N | | | | G | | R | V | H | | Y | | | | V | | K |
| TAA | G | | N | | A | | G | | | V | H | | | | | | V | | K |
| TAA | G | | N | | | | | | | V | H | | | | | | V | | K |

TABLE 5D
SpCas9 amino acid substitutions and PAMs.

| | SpCas9 amino acid position | | | | | | | | | |
|---|---|---|---|---|---|---|---|---|---|---|
| SpCas9/ | 1114 | 1131 | 1135 | 1150 | 1156 | 1180 | 1191 | 1218 | 1219 | 1221 |
| PAM | R | Y | D | E | K | D | K | G | E | Q |
| SacB.TAT | | | N | | | | N | | V | H |
| SacB.TAT | | | N | | | | | S | V | H |
| AAT | | | N | | | | | S | V | H |
| TAT | G | | N | | | G | | S | V | H |
| TAT | G | | N | | | G | | S | V | H |
| TAT | G | C | N | | | G | | S | V | H |
| TAT | G | C | N | | | G | | S | V | H |
| TAT | G | C | N | | | G | | S | V | H |
| TAT | G | C | N | | E | G | | S | V | H |
| TAT | G | C | N | V | | G | | S | V | H |
| TAT | | C | N | | | G | | S | V | H |
| TAT | G | C | N | | | G | | S | V | H |

| | SpCas9 amino acid position | | | | | | | | | |
|---|---|---|---|---|---|---|---|---|---|---|
| SpCas9/ | 1227 | 1249 | 1253 | 1286 | 1293 | 1320 | 1321 | 1332 | 1335 | 1339 |
| PAM | A | P | E | N | A | A | P | D | R | T |
| SacB.TAT | | | | | | V | S | | L | |
| SacB.TAT | | S | | | | | S | G | L | |
| AAT | V | S | | K | T | | S | G | L | I |
| TAT | | S | K | | | | S | G | L | |
| TAT | | S | | | | | S | G | L | |
| TAT | | S | | | | | S | G | L | |
| TAT | | S | | | | | S | G | L | |
| TAT | | S | | | | | S | G | L | |
| TAT | | S | | | | | S | G | L | |
| TAT | | S | | | | | S | G | L | |
| TAT | | S | | | | | S | G | L | |
| TAT | | S | | | | | S | G | L | |

TABLE 5E
SpCas9 amino acid substitutions and PAMs.

| | SpCas9 amino acid position | | | | | | | | | | | | | |
|---|---|---|---|---|---|---|---|---|---|---|---|---|---|---|
| | 1114 | 1127 | 1135 | 1180 | 1207 | 1219 | 1234 | 1286 | 1301 | 1332 | 1335 | 1337 | 1338 | 1349 |
| SpCas9 | R | D | D | D | E | E | N | N | P | D | R | T | S | H |

| | | | | | | | | | | | | | |
|---|---|---|---|---|---|---|---|---|---|---|---|---|---|
| SacB.CAC | | | N | | | V | | | N | Q | N | | |
| AAC | G | | N | | | V | | | N | Q | N | | |
| AAC | G | | N | | | V | | | N | Q | N | | |
| TAC | G | | N | | | V | | | N | Q | N | | |
| TAC | G | | N | | | V | | H | N | Q | N | | |
| TAC | G | | N | | G | V | D | H | N | Q | N | | |
| TAC | G | | N | | | V | | | N | Q | N | | |
| TAC | G | G | N | E | | V | | H | N | Q | N | | |
| TAC | G | | N | | | V | | H | N | Q | N | | |
| TAC | G | | N | | | V | | | N | Q | N | T | R |

[0474] The sequences of exemplary SpCas9 proteins capable of binding a PAM sequence follow:

[0475] The amino acid sequence of an exemplary PAM-binding SpCas9 is as follows:

[sequence omitted]

[0476] The amino acid sequence of an exemplary PAM-binding SpCas9n is as follows:

MDKKYSIGLAIGTNSVGWAVITDEYKVPSKKFKVLGNTDRHSIKKNLIGA
LLFDSGETAEATRLKRTARRRYTRRKNRICYLQEIFSNEMAKVDDSFFHR
LEESFLVEEDKKHERHPIFGNIVDEVAYHEKYPTIYHLRKKLVDSTDKAD
LRLIYLALAHMIKFRGHFLIEGDLNPDNSDVDKLFIQLVQTYNQLFEENP
INASGVDAKAILSARLSKSRRLENLIAQLPGEKKNGLFGNLIALSLGLTP
NFKSNFDLAEDAKLQLSKDTYDDDLDNLLAQIGDQYADLFLAAKNLSDAI
LLSDILRVNTEITKAPLSASMIKRYDEHHQDLTLLKALVRQQLPEKYKEI
FFDQSKNGYAGYIDGGASQEEFYKFIKPILEKMDGTEELLVKLNREDLLR
KQRTFDNGSIPHQIHLGELHAILRRQEDFYPFLKDNREKIEKILTFRIPY
YVGPLARGNSRFAWMTRKSEETITPWNFEEVVDKGASAQSFIERMTNFDK
NLPNEKVLPKHSLLYEYFTVYNELTKVKYVTEGMRKPAFLSGEQKKAIVD
LLFKTNRKVTVKQLKEDYFKKIECFDSVEISGVEDRFNASLGTYHDLLKI
IKDKDFLDNEENEDILEDIVLTLTLFEDREMIEERLKTYAHLFDDKVMKQ
LKRRRYTGWGRLSRKLINGIRDKQSGKTILDFLKSDGFANRNFMQLIHDD
SLTFKEDIQKAQVSGQGDSLHEHIANLAGSPAIKKGILQTVKVVDELVKV
MGRHKPENIVIEMARENQTTQKGQKNSRERMKRIEEGIKELGSQILKEHP
VENTQLQNEKLYLYYLQNGRDMYVDQELDINRLSDYDVDHIVPQSFLKDD
SIDNKVLTRSDKNRGKSDNVPSEEVVKKMKNYWRQLLNAKLITQRKFDNL
TKAERGGLSELDKAGFIKRQLVETRQITKHVAQILDSRMNTKYDENDKLI
REVKVITLKSKLVSDFRKDFQFYKVREINNYHHAHDAYLNAVVGTALIKK
YPKLESEFVYGDYKVYDVRKMIAKSEQEIGKATAKYFFYSNIMNFFKTEI
TLANGEIRKRPLIETNGETGEIVWDKGRDFATVRKVLSMPQVNIVKKTEV
QTGGFSKESILPKRNSDKLIARKKDWDPKKYGGFDSPTVAYSVLVVAKVE
KGKSKKLKSVKELLGITIMERSSFEKNPIDFLEAKGYKEVKKDLIIKLPK
YSLFELENGRKRMLASAGELQKGNELALPSKYVNFLYLASHYEKLKGSPE
DNEQKQLFVEQHKHYLDEIIEQISEFSKRVILADANLDKVLSAYNKHRDK
PIREQAENIIHLFTLTNLGAPAAFKYFDTTIDRKRYTSTKEVLDATLIHQ
SITGLYETRIDLSQLGGD

[0477] The amino acid sequence of an exemplary PAM-binding SpEQR Cas9 is as follows:

MDKKYSIGLAIGTNSVGWAVITDEYKVPSKKFKVLGNTDRHSIKKNLIGA
LLFDSGETAEATRLKRTARRRYTRRKNRICYLQEIFSNEMAKVDDSFFHR
LEESFLVEEDKKHERHPIFGNIVDEVAYHEKYPTIYHLRKKLVDSTDKAD
LRLIYLALAHMIKFRGHFLIEGDLNPDNSDVDKLFIQLVQTYNQLFEENP
INASGVDAKAILSARLSKSRRLENLIAQLPGEKKNGLFGNLIALSLGLTP
NFKSNFDLAEDAKLQLSKDTYDDDLDNLLAQIGDQYADLFLAAKNLSDAI
LLSDILRVNTEITKAPLSASMIKRYDEHHQDLTLLKALVRQQLPEKYKEI
FFDQSKNGYAGYIDGGASQEEFYKFIKPILEKMDGTEELLVKLNREDLLR
KQRTFDNGSIPHQIHLGELHAILRRQEDFYPFLKDNREKIEKILTFRIPY
YVGPLARGNSRFAWMTRKSEETITPWNFEEVVDKGASAQSFIERMTNFDK
NLPNEKVLPKHSLLYEYFTVYNELTKVKYVTEGMRKPAFLSGEQKKAIVD
LLFKTNRKVTVKQLKEDYFKKIECFDSVEISGVEDRFNASLGTYHDLLKI
IKDKDFLDNEENEDILEDIVLTLTLFEDREMIEERLKTYAHLFDDKVMKQ
LKRRRYTGWGRLSRKLINGIRDKQSGKTILDFLKSDGFANRNFMQLIHDD
SLTFKEDIQKAQVSGQGDSLHEHIANLAGSPAIKKGILQTVKVVDELVKV
MGRHKPENIVIEMARENQTTQKGQKNSRERMKRIEEGIKELGSQILKEHP
VENTQLQNEKLYLYYLQNGRDMYVDQELDINRLSDYDVDHIVPQSFLKDD
SIDNKVLTRSDKNRGKSDNVPSEEVVKKMKNYWRQLLNAKLITQRKFDNL
TKAERGGLSELDKAGFIKRQLVETRQITKHVAQILDSRMNTKYDENDKLI
REVKVITLKSKLVSDFRKDFQFYKVREINNYHHAHDAYLNAVVGTALIKK
YPKLESEFVYGDYKVYDVRKMIAKSEQEIGKATAKYFFYSNIMNFFKTEI
TLANGEIRKRPLIETNGETGEIVWDKGRDFATVRKVLSMPQVNIVKKTEV
QTGGFSKESILPKRNSDKLIARKKDWDPKKYGGFESPTVAYSVLVVAKVE
KGKSKKLKSVKELLGITIMERSSFEKNPIDFLEAKGYKEVKKDLIIKLPK
YSLFELENGRKRMLASAGELQKGNELALPSKYVNFLYLASHYEKLKGSPE
DNEQKQLFVEQHKHYLDEIIEQISEFSKRVILADANLDKVLSAYNKHRDK
PIREQAENIIHLFTLTNLGAPAAFKYFDTTIDRKQYRSTKEVLDATLIHQ
SITGLYETRIDLSQLGGD

[0478] In the above sequence, residues E1134, Q1334, and R1336, which can be mutated from D1134, R1334, and T1336 to yield a SpEQR Cas9, are underlined and in bold.

[0479] The amino acid sequence of an exemplary PAM-binding SpVQR Cas9 is as follows:

MDKKYSIGLAIGTNSVGWAVITDEYKVPSKKFKVLGNTDRHSIKKNLIGA
LLFDSGETAEATRLKRTARRRYTRRKNRICYLQEIFSNEMAKVDDSFFHR
LEESFLVEEDKKHERHPIFGNIVDEVAYHEKYPTIYHLRKKLVDSTDKAD
LRLIYLALAHMIKFRGHFLIEGDLNPDNSDVDKLFIQLVQTYNQLFEENP
INASGVDAKAILSARLSKSRRLENLIAQLPGEKKNGLFGNLIALSLGLTP
NFKSNFDLAEDAKLQLSKDTYDDDLDNLLAQIGDQYADLFLAAKNLSDAI
LLSDILRVNTEITKAPLSASMIKRYDEHHQDLTLLKALVRQQLPEKYKEI
FFDQSKNGYAGYIDGGASQEEFYKFIKPILEKMDGTEELLVKLNREDLLR
KQRTFDNGSIPHQIHLGELHAILRRQEDFYPFLKDNREKIEKILTFRIPY
YVGPLARGNSRFAWMTRKSEETITPWNFEEVVDKGASAQSFIERMTNFDK
NLPNEKVLPKHSLLYEYFTVYNELTKVKYVTEGMRKPAFLSGEQKKAIVD
LLFKTNRKVTVKQLKEDYFKKIECFDSVEISGVEDRFNASLGTYHDLLKI
IKDKDFLDNEENEDILEDIVLTLTLFEDREMIEERLKTYAHLFDDKVMKQ
LKRRRYTGWGRLSRKLINGIRDKQSGKTILDFLKSDGFANRNFMQLIHDD
SLTFKEDIQKAQVSGQGDSLHEHIANLAGSPAIKKGILQTVKVVDELVKV
MGRHKPENIVIEMARENQTTQKGQKNSRERMKRIEEGIKELGSQILKEHP
VENTQLQNEKLYLYYLQNGRDMYVDQELDINRLSDYDVDHIVPQSFLKDD
SIDNKVLTRSDKNRGKSDNVPSEEVVKKMKNYWRQLLNAKLITQRKFDNL
TKAERGGLSELDKAGFIKRQLVETRQITKHVAQILDSRMNTKYDENDKLI
REVKVITLKSKLVSDFRKDFQFYKVREINNYHHAHDAYLNAVVGTALIKK
YPKLESEFVYGDYKVYDVRKMIAKSEQEIGKATAKYFFYSNIMNFFKTEI
TLANGEIRKRPLIETNGETGEIVWDKGRDFATVRKVLSMPQVNIVKKTEV
QTGGFSKESILPKRNSDKLIARKKDWDPKKYGGFVSPTVAYSVLVVAKVE
KGKSKKLKSVKELLGITIMERSSFEKNPIDFLEAKGYKEVKKDLIIKLPK
YSLFELENGRKRMLASAGELQKGNELALPSKYVNFLYLASHYEKLKGSPE
DNEQKQLFVEQHKHYLDEIIEQISEFSKRVILADANLDKVLSAYNKHRDK
PIREQAENIIHLFTLTNLGAPAAFKYFDTTIDRKQYRSTKEVLDATLIHQ
SITGLYETRIDLSQLGGD

[0480] In the above sequence, residues V1134, Q1334, and R1336, which can be mutated from D1134, R1334, and T1336 to yield a SpVQR Cas9, are underlined and in bold.

[0481] The amino acid sequence of an exemplary PAM-binding SpVRER Cas9 is as follows:

MDKKYSIGLAIGTNSVGWAVITDEYKVPSKKFKVLGNTDRHSIKKNLIGA
LLFDSGETAEATRLKRTARRRYTRRKNRICYLQEIFSNEMAKVDDSFFHR
LEESFLVEEDKKHERHPIFGNIVDEVAYHEKYPTIYHLRKKLVDSTDKAD
LRLIYLALAHMIKFRGHFLIEGDLNPDNSDVDKLFIQLVQTYNQLFEENP
INASGVDAKAILSARLSKSRRLENLIAQLPGEKKNGLFGNLIALSLGLTP
NFKSNFDLAEDAKLQLSKDTYDDDLDNLLAQIGDQYADLFLAAKNLSDAI
LLSDILRVNTEITKAPLSASMIKRYDEHHQDLTLLKALVRQQLPEKYKEI
FFDQSKNGYAGYIDGGASQEEFYKFIKPILEKMDGTEELLVKLNREDLLR
KQRTFDNGSIPHQIHLGELHAILRRQEDFYPFLKDNREKIEKILTFRIPY
YVGPLARGNSRFAWMTRKSEETITPWNFEEVVDKGASAQSFIERMTNFDK
NLPNEKVLPKHSLLYEYFTVYNELTKVKYVTEGMRKPAFLSGEQKKAIVD
LLFKTNRKVTVKQLKEDYFKKIECFDSVEISGVEDRFNASLGTYHDLLKI
IKDKDFLDNEENEDILEDIVLTLTLFEDREMIEERLKTYAHLFDDKVMKQ
LKRRRYTGWGRLSRKLINGIRDKQSGKTILDFLKSDGFANRNFMQLIHDD
SLTFKEDIQKAQVSGQGDSLHEHIANLAGSPAIKKGILQTVKVVDELVKV
MGRHKPENIVIEMARENQTTQKGQKNSRERMKRIEEGIKELGSQILKEHP
VENTQLQNEKLYLYYLQNGRDMYVDQELDINRLSDYDVDHIVPQSFLKDD
SIDNKVLTRSDKNRGKSDNVPSEEVVKKMKNYWRQLLNAKLITQRKFDNL
TKAERGGLSELDKAGFIKRQLVETRQITKHVAQILDSRMNTKYDENDKLI
REVKVITLKSKLVSDFRKDFQFYKVREINNYHHAHDAYLNAVVGTALIKK
YPKLESEFVYGDYKVYDVRKMIAKSEQEIGKATAKYFFYSNIMNFFKTEI
TLANGEIRKRPLIETNGETGEIVWDKGRDFATVRKVLSMPQVNIVKKTEV
QTGGFSKESILPKRNSDKLIARKKDWDPKKYGGFVSPTVAYSVLVVAKVE
KGKSKKLKSVKELLGITIMERSSFEKNPIDFLEAKGYKEVKKDLIIKLPK
YSLFELENGRKRMLASARELQKGNELALPSKYVNFLYLASHYEKLKGSPE
DNEQKQLFVEQHKHYLDEIIEQISEFSKRVILADANLDKVLSAYNKHRDK
PIREQAENIIHLFTLTNLGAPAAFKYFDTTIDRKEYRSTKEVLDATLIHQ
SITGLYETRIDLSQLGGD.

[0482] In the above sequence, residues V1134, R1217, Q1334, and R1336, which can be mutated from D1134, G1217, R1334, and T1336 to yield a SpVRER Cas9, are underlined and in bold.

[0483] In some embodiments, the Cas9 domain is a recombinant Cas9 domain. In some embodiments, the recombinant Cas9 domain is a SpyMacCas9 domain. In some embodiments, the SpyMacCas9 domain is a nuclease active SpyMacCas9, a nuclease inactive SpyMacCas9 (SpyMacCas9d), or a SpyMacCas9 nickase (SpyMacCas9n). In some embodiments, the SaCas9 domain, the SaCas9d domain, or the SaCas9n domain can bind to a nucleic acid sequence having a non-canonical PAM. In some embodiments, the SpyMacCas9 domain, the SpCas9d domain, or the SpCas9n domain can bind to a nucleic acid sequence having a NAA PAM sequence.

[0484] The sequence of an exemplary Cas9 A homolog of Spy Cas9 in Streptococcus macacae with native 5′-NAAN-3′ PAM specificity is known in the art and described, for example, by Jakimo et al., (www.biorxiv.org/content/biorxiv/early/2018/09/27/429654.full.pdf), and is provided below.

SpyMacCas9
MDKKYSIGLDIGTNSVGWAVITDDYKVPSKKFKVLGNTDRHSIKKNLIGA
LLFGSGETAEATRLKRTARRRYTRRKNRICYLQEIFSNEMAKVDDSFFHR
LEESFLVEEDKKHERHPIFGNIVDEVAYHEKYPTIYHLRKKLADSTDKAD
LRLIYLALAHMIKFRGHFLIEGDLNPDNSDVDKLFIQLVQIYNQLFEENP
INASRVDAKAILSARLSKSRRLENLIAQLPGEKRNGLFGNLIALSLGLTP
NFKSNFDLAEDAKLQLSKDTYDDDLDNLLAQIGDQYADLFLAAKNLSDAI
LLSDILRVNSEITKAPLSASMIKRYDEHHQDLTLLKALVRQQLPEKYKEI
FFDQSKNGYAGYIDGGASQEEFYKFIKPILEKMDGTEELLVKLNREDLLR
KQRTFDNGSIPHQIHLGELHAILRRQEDFYPFLKDNREKIEKILTFRIPY
YVGPLARGNSRFAWMTRKSEETITPWNFEEVVDKGASAQSFIERMTNFDK
NLPNEKVLPKHSLLYEYFTVYNELTKVKYVTEGMRKPAFLSGEQKKAIVD
LLFKTNRKVTVKQLKEDYFKKIECFDSVEISGVEDRFNASLGAYHDLLKI
IKDKDFLDNEENEDILEDIVLTLTLFEDRGMIEERLKTYAHLFDDKVMKQ
LKRRRYTGWGRLSRKLINGIRDKQSGKTILDFLKSDGFANRNFMQLIHDD
SLTFKEDIQKAQVSGQGHSLHEQIANLAGSPAIKKGILQTVKIVDELVKV
MGHKPENIVIEMARENQTTQKGQKNSRERMKRIEEGIKELGSQILKEHPV
ENTQLQNEKLYLYYLQNGRDMYVDQELDINRLSDYDVDHIVPQSFIKDDS
IDNKVLTRSDKNRGKSDNVPSEEVVKKMKNYWRQLLNAKLITQRKFDNLT
KAERGGLSELDKAGFIKRQLVETRQITKHVAQILDSRMNTKYDENDKLIR
EVKVITLKSKLVSDFRKDFQFYKVREINNYHHAHDAYLNAVVGTALIKKY
PKLESEFVYGDYKVYDVRKMIAKSEQEIGKATAKYFFYSNIMNFFKTEIT
LANGEIRKRPLIETNGETGEIVWDKGRDFATVRKVLSMPQVNIVKKTEIQ
TVGQNGGLFDDNPKSPLEVTPSKLVPLKKELNPKKYGGYQKPTTAYPVLL
ITDTKQLIPISVMNKKQFEQNPVKFLRDRGYQQVGKNDFIKLPKYTLVDI
GDGIKRLWASSKEIHKGNQLVVSKKSQILLYHAHHLDSDLSNDYLQNHNQ
QFDVLFNEIISFSKKCKLGKEHIQKIENVYSNKKNSASIEELAESFIKLL
GFTQLGATSPFNFLGVKLNQKQYKGKKDYILPCTEGTLIRQSITGLYETR
VDLSKIGED.

[0485] In some embodiments, a variant Cas9 protein harbors, H840A, P475A, W476A, N477A, D1125A, W1126A, and D1218A mutations such that the polypeptide has a reduced ability to cleave a target DNA or RNA. Such a Cas9 protein has a reduced ability to cleave a target DNA (e.g., a single stranded target DNA) but retains the ability to bind a target DNA (e.g., a single stranded target DNA). As another non-limiting example, in some embodiments, the variant Cas9 protein harbors D10A, H840A, P475A, W476A, N477A, D1125A, W1126A, and D1218A mutations such that the polypeptide has a reduced ability to cleave a target DNA. Such a Cas9 protein has a reduced ability to cleave a target DNA (e.g., a single stranded target DNA) but retains the ability to bind a target DNA (e.g., a single stranded target DNA). In some embodiments, when a variant Cas9 protein harbors W476A and W1126A mutations or when the variant Cas9 protein harbors P475A, W476A, N477A, D1125A, W1126A, and D1218A mutations, the variant Cas9 protein does not bind efficiently to a PAM sequence. Thus, in some such cases, when such a variant Cas9 protein is used in a method of binding, the method does not require a PAM sequence. In other words, in some embodiments, when such a variant Cas9 protein is used in a method of binding, the method can include a guide RNA, but the method can be performed in the absence of a PAM sequence (and the specificity of binding is therefore provided by the targeting segment of the guide RNA). Other residues can be mutated to achieve the above effects (i.e., inactivate one or the other nuclease portions). As non-limiting examples, residues D10, G12, G17, E762, H840, N854, N863, H982, H983, A984, D986, and/or A987 can be altered (i.e., substituted). Also, mutations other than alanine substitutions are suitable.

[0486] In some embodiments, a CRISPR protein-derived domain of a base editor can comprise all or a portion of a Cas9 protein with a canonical PAM sequence (NGG). In other embodiments, a Cas9-derived domain of a base editor can employ a non-canonical PAM sequence. Such sequences have been described in the art and would be apparent to the skilled artisan. For example, Cas9 domains that bind non-canonical PAM sequences have been described in Kleinstiver, B. P., et al., “Engineered CRISPR-Cas9 nucleases with altered PAM specificities” Nature 523, 481-485 (2015); and Kleinstiver, B. P., et al., “Broadening the targeting range of Staphylococcus aureus CRISPR-Cas9 by modifying PAM recognition” Nature Biotechnology 33, 1293-1298 (2015); the entire contents of each are hereby incorporated by reference.

[0487] In some embodiments, the Cas9 is a Neisseria meningitidis Cas9 (NmeCas9) or a variant thereof. In some embodiments, the NmeCas9 has specificity for a NNNNGAYW PAM, wherein Y is C or T and W is A or T. In some embodiments, the NmeCas9 has specificity for a NNNNGYTT PAM, wherein Y is C or T. In some embodiments, the NmeCas9 has specificity for a NNNNGTCT PAM. In some embodiments, the NmeCas9 is a Nme1 Cas9. In some embodiments, the NmeCas9 has specificity for a NNNNGATT PAM, a NNNNCCTA PAM, a NNNNCCTC PAM, a NNNNCCTT PAM, a NNNNCCTG PAM, a NNNNCCGT PAM, a NNNNCCGGPAM, a NNNNCCCA PAM, a NNNNCCCT PAM, a NNNNCCCC PAM, a NNNNCCAT PAM, a NNNNCCAG PAM, a NNNNCCAT PAM, or a NNNGATT PAM. In some embodiments, the Nme1Cas9 has specificity for a NNNNGATT PAM, a NNNNCCTA PAM, a NNNNCCTC PAM, a NNNNCCTT PAM, or a NNNNCCTG PAM. In some embodiments, the NmeCas9 has specificity for a CAA PAM, a CAAA PAM, or a CCA PAM. In some embodiments, the NmeCas9 is a Nme2 Cas9. In some embodiments, the NmeCas9 has specificity for a NNNNCC (N4CC) PAM, wherein N is any one of A, G, C, or T. in some embodiments, the NmeCas9 has specificity for a NNNNCCGT PAM, a NNNNCCGGPAM, a NNNNCCCA PAM, a NNNNCCCT PAM, a NNNNCCCC PAM, a NNNNCCAT PAM, a NNNNCCAG PAM, a NNNNCCAT PAM, or a NNNGATT PAM. In some embodiments, the NmeCas9 is a Nme3Cas9. In some embodiments, the NmeCas9 has specificity for a NNNNCAAA PAM, a NNNNCC PAM, or a NNNNCNNN PAM. Additional NmeCas9 features and PAM sequences as described in Edraki et al. Mol. Cell. (2019) 73(4): 714-726 is incorporated herein by reference in its entirety.

[0488] An exemplary amino acid sequence of a Nme1Cas9 is provided below:

type II CRISPR RNA-guided endonuclease Cas9
[Neisseria meningitidis] WP_002235162.1

| | |
|---|---|
| 1 | maafkpnpin yilgldigia svgwamveid edenpiclid |
| | lgvrvferae vpktgdslam |
| 61 | arrlarsvrr ltrrrahrll rarrllkreg vlqaadfden |
| | glikslpntp wqlraaaldr |
| 121 | kltplewsav llhlikhrgy lsqrkneget adkelgallk |
| | gvadnahalq tgdfrtpael |
| 181 | alnkfekesg hirnqrgdys htfsrkdlqa elillfekqk |
| | efgnphvsgg lkegietllm |
| 241 | tqrpalsgda vqkmlghctf epaepkaakn tytaerfiwl |
| | tklnnlrile qgserpltdt |
| 301 | eratlmdepy rkskltyaqa rkllgledta ffkglrygkd |
| | naeastlmem kayhaisral |
| 361 | ekeglkdkks plnlspelqd eigtafslfk tdeditgrlk |
| | driqpeilea llkhisfdkf |
| 421 | vqislkalrr ivplmeqgkr ydeacaeiyg dhygkkntee |
| | kiylppipad eirnpvvlra |
| 481 | lsgarkving vvrrygspar ihietarevg ksfkdrkeie |
| | krqeenrkdr ekaaakfrey |
| 541 | fpnfvgepks kdilklrlye qqhgkclysg keinlgrlne |
| | kgyveidhal pfsrtwddsf |
| 601 | nnkvlvlgse nqnkgnqtpy eyfngkdnsr ewqefkarve |
| | tsrfprskkq rillqkfded |
| 661 | gfkernlndt ryvnrflcqf vadrmrltgk gkkrvfasng |
| | qitnllrgfw glrkvraend |
| 721 | rhhaldavvv acstvamqqk itrfvrykem nafdgktidk |
| | etgevlhqkt hfpqpweffa |
| 781 | qevmirvfgk pdgkpefeea dtpeklrtll aeklssrpea |
| | vheyvtplfv srapnrkmsg |
| 841 | qghmetvksa krldegvsvl rvpltqlklk dlekmvnrer |
| | epklyealka rleahkddpa |
| 901 | kafaepfyky dkagnrtqqv kavrveqvqk tgvwvrnhng |
| | iadnatmvry dvfekgdkyy |
| 961 | lvpiyswqva kgilpdravv qgkdeedwql iddsfnfkfs |
| | lhpndlvevi tkkarmfgyf |
| 1021 | aschrgtgni nirihdldhk igkngilegi gvktalsfqk |
| | yqidelgkei rperlkkrpp |
| l081 | vr |

[0489] An exemplary amino acid sequence of a Nme2Cas9 is provided below:

```
type II CRISPR RNA-guided endonuclease Cas9 [Neisseria meningitidis]
WP_002230835.1
      1 maafkpnpin yilgldigia svgwamveid eeenpirlid lgvrvferae vpktgdslam
    61 arrlarsvrr ltrrrahrll rarrllkreg vlqaadfden glikslpntp wqlraaaldr
  121 kltplewsav llhlikhrgy lsqrkneget adkelgallk gvannahalq tgdfrtpael
  181 alnkfekesg hirnqrgdys htfsrkdlqa elillfekqk efgnphvsgg lkegietllm
  241 tqrpalsgda vqkmlghctf epaepkaakn tytaerfiwl tklnnlrile qgserpltdt
  301 eratlmdepy rkskltyaqa rkllgledta ffkglrygkd naeastlmem kayhaisral
  361 ekeglkdkks plnlsselqd eigtafslfk tdeditgrlk drvqpeilea llkhisfdkf
  421 vqislkalrr ivplmeqgkr ydeacaeiyg dhygkkntee kiylppipad eirnpvvlra
  481 lsgarkving vvrrygspar ihietarevg ksfkdrkeie krqeenrkdr ekaaakfrey
  541 fpnfvgepks kdilklrlye qqhgkclysg keinlvrlne kgyveidhal pfsrtwddsf
  601 nnkvlvlgse nqnkgnqtpy eyfngkdnsr ewqefkarve tsrfprskkq rillqkfded
  661 gfkecnlndt ryvnrflcqf vadhilltgk gkrrvfasng qitnllrgfw glrkvraend
  721 rhhaldavvv acstvamqqk itrfvrykem nafdgktidk etgkvlhqkt hfpqpweffa
  781 qevmirvfgk pdgkpefeea dtpeklrtll aeklssrpea vheyvtplfv srapnrkmsg
  841 ahkdtlrsak rfvkhnekis vkrvwlteik ladlenmvny kngreielye alkarleayg
  901 gnakqafdpk dnpfykkggq lvkavrvekt qesgvllnkk naytiadngd mvrvdvfckv
  961 dkkgknqyfi vpiyawqvae nilpdidckg yriddsytfc fslhkydlia fqkdekskve
1021 fayyincdss ngrfylawhd kgskeqqfri stqnlvliqk yqvnelgkei rpcrlkkrpp
1081 vr
```

Cas9 Domains with Reduced PAM Exclusivity

[0490] Typically, Cas9 proteins, such as Cas9 from S. pyogenes (spCas9), require a canonical NGG PAM sequence to bind a particular nucleic acid region, where the “N” in “NWG” is adenosine (A), thymidine (T), or cytosine (C), and the G is guanosine. This may limit the ability to edit desired bases within a genome. In some embodiments, the base editing fusion proteins provided herein may need to be placed at a precise location, for example a region comprising a target base that is upstream of the PAM. See e.g., Komor, A. C., et al., “Programmable editing of a target base in genomic DNA without double-stranded DNA cleavage” Nature 533, 420-424 (2016), the entire contents of which are hereby incorporated by reference. Accordingly, in some embodiments, any of the fusion proteins provided herein may contain a Cas9 domain that is capable of binding a nucleotide sequence that does not contain a canonical (e.g., NGG) PAM sequence. Cas9 domains that bind to non-canonical PAM sequences have been described in the art and would be apparent to the skilled artisan. For example, Cas9 domains that bind non-canonical PAM sequences have been described in Kleinstiver, B. P., et al., “Engineered CRISPR-Cas9 nucleases with altered PAM specificities” Nature 523, 481-485 (2015); and Kleinstiver, B. P., et al., “Broadening the targeting range of Staphylococcus aureus CRISPR-Cas9 by modifying PAM recognition” Nature Biotechnology 33, 1293-1298 (2015); the entire contents of each are hereby incorporated by reference.

### High Fidelity Cas9 Domains

[0491] Some aspects of the disclosure provide high fidelity Cas9 domains. In some embodiments, high fidelity Cas9 domains are engineered Cas9 domains comprising one or more mutations that decrease electrostatic interactions between the Cas9 domain and a sugar-phosphate backbone of a DNA, as compared to a corresponding wild-type Cas9 domain. Without wishing to be bound by any particular theory, high fidelity Cas9 domains that have decreased electrostatic interactions with a sugar-phosphate backbone of DNA may have less off-target effects. In some embodiments, a Cas9 domain (e.g., a wild-type Cas9 domain) comprises one or more mutations that decreases the association between the Cas9 domain and a sugar-phosphate backbone of a DNA. In some embodiments, a Cas9 domain comprises one or more mutations that decreases the association between the Cas9 domain and a sugar-phosphate backbone of a DNA by at least 1%, at least 2%, at least 3%, at least 4%, at least 5%, at least 10%, at least 15%, at least 20%, at least 25%, at least 30%, at least 35%, at least 40%, at least 45%, at least 50%, at least 55%, at least 60%, at least 65%, or at least 70%.

[0492] In some embodiments, any of the Cas9 fusion proteins provided herein comprise one or more of a N497X, a R661X, a Q695X, and/or a Q926X mutation, or a corresponding mutation in any of the amino acid sequences provided herein, wherein X is any amino acid. In some embodiments, any of the Cas9 fusion proteins provided herein comprise one or more of a N497A, a R661A, a Q695A, and/or a Q926A mutation, or a corresponding mutation in any of the amino acid sequences provided herein. In some embodiments, the Cas9 domain comprises a D10A mutation, or a corresponding mutation in any of the amino acid sequences provided herein. Cas9 domains with high fidelity are known in the art and would be apparent to the skilled artisan. For example, Cas9 domains with high fidelity have been described in Kleinstiver, B. P., et al. “High-fidelity CRISPR-Cas9 nucleases with no detectable genome-wide off-target effects.” Nature 529, 490-495 (2016); and Slaymaker, I. M., et al. “Rationally engineered Cas9 nucleases with improved specificity.” Science 351, 84-88 (2015); the entire contents of each are incorporated herein by reference.

[0493] In some embodiments, the modified Cas9 is a high fidelity Cas9 enzyme. In some embodiments, the high fidelity Cas9 enzyme is SpCas9(K855A), eSpCas9(1.1), SpCas9-HF1, or hyper accurate Cas9 variant (HypaCas9). The modified Cas9 eSpCas9(1.1) contains alanine substitutions that weaken the interactions between the HNH/RuvC groove and the non-target DNA strand, preventing strand separation and cutting at off-target sites. Similarly, SpCas9-HF1 lowers off-target editing through alanine substitutions that disrupt Cas9's interactions with the DNA phosphate backbone. HypaCas9 contains mutations (SpCas9 N692A/M694A/Q695A/H698A) in the REM3 domain that increase Cas9 proofreading and target discrimination. All three high fidelity enzymes generate less off-target editing than wildtype Cas9.

[0494] An exemplary high fidelity Cas9 is provided below.

[0495] High Fidelity Cas9 domain mutations relative to Cas9 are shown in bold and underlined.

DKKYSIGLAIGTNSVGWAVITDEYKVPSKKFKVLGNTDRHSIKKNLIGALLFDSGETAEATR
LKRTARRRYTRRKNRICYLQEIFSNEMAKVDDSFFHRLEESFLVEEDKKHERHPIFGNIVDE
VAYHEKYPTIYHLRKKLVDSTDKADLRLIYLALAHMIKFRGHFLIEGDLNPDNSDVDKLFIQ
LVQTYNQLFEENPINASGVDAKAILSARLSKSRRLENLIAQLPGEKKNGLFGNLIALSLGLT
PNFKSNFDLAEDAKLQLSKDTYDDDLDNLLAQIGDQYADLFLAAKNLSDAILLSDILRVNTE
ITKAPLSASMIKRYDEHHQDLTLLKALVRQQLPEKYKEIFFDQSKNGYAGYIDGGASQEEFY
KFIKPILEKMDGTEELLVKLNREDLLRKQRTFDNGSIPHQIHLGELHAILRRQEDFYPFLKD
NREKIEKILTFRIPYYVGPLARGNSRFAWMTRKSEETITPWNFEEVVDKGASAQSFIERMTA
FDKNLPNEKVLPKHSLLYEYFTVYNELTKVKYVTEGMRKPAFLSGEQKKAIVDLLFKTNRKV
TVKQLKEDYFKKIECFDSVEISGVEDRFNASLGTYHDLLKIIKDKDFLDNEENEDILEDIVL
TLTLFEDREMIEERLKTYAHLFDDKVMKQLKRRRYTGWGALSRKLINGIRDKQSGKTILDFL
KSDGFANRNFMALIHDDSLTFKEDIQKAQVSGQGDSLHEHIANLAGSPAIKKGILQTVKVVD
ELVKVMGRHKPENIVIEMARENQTTQKGQKNSRERMKRIEEGIKELGSQILKEHPVENTQLQ
NEKLYLYYLQNGRDMYVDQELDINRLSDYDVDHIVPQSFLKDDSIDNKVLTRSDKNRGKSDN
VPSEEVVKKMKNYWRQLLNAKLITQRKFDNLTKAERGGLSELDKAGFIKRQLVETRAITKHV
AQILDSRMNTKYDENDKLIREVKVITLKSKLVSDFRKDFQFYKVREINNYHHAHDAYLNAVV
GTALIKKYPKLESEFVYGDYKVYDVRKMIAKSEQEIGKATAKYFFYSNIMNFFKTEITLANG
EIRKRPLIETNGETGEIVWDKGRDFATVRKVLSMPQVNIVKKTEVQTGGFSKESILPKRNSD
KLIARKKDWDPKKYGGFDSPTVAYSVLVVAKVEKGKSKKLKSVKELLGITIMERSSFEKNPI
DFLEAKGYKEVKKDLIIKLPKYSLFELENGRKRMLASAGELQKGNELALPSKYVNFLYLASH
YEKLKGSPEDNEQKQLFVEQHKHYLDEIIEQISEFSKRVILADANLDKVLSAYNKHRDKPIR
EQAENIIHLFTLTNLGAPAAFKYFDTTIDRKRYTSTKEVLDATLIHQSITGLYETRIDLSQL
GGD

Fusion Proteins Comprising a Cas9 Domain and a Cytidine Deaminase and/or Adenosine Deaminase

[0496] Some aspects of the disclosure provide fusion proteins comprising a napDNAbp (e.g., a Cas9 domain) and one or more adenosine deaminase, cytidine deaminase domains, and/or DNA glycosylase domains. In some embodiments, the fusion protein comprises a Cas9 domain and an adenosine deaminase domain (e.g., TadA*A). It should be appreciated that the Cas9 domain may be any of the Cas9 domains or Cas9 proteins (e.g., dCas9 or nCas9) provided herein. In some embodiments, any of the Cas9 domains or Cas9 proteins (e.g., dCas9 or nCas9) provided herein may be fused with any of the cytidine deaminases and/or adenosine deaminases (e.g., TadA*A) provided herein. For example, and without limitation, in some embodiments, the fusion protein comprises the structure:
[0497] NH₂-[cytidine deaminase]-[Cas9 domain]-[adenosine deaminase]-COOH;
[0498] NH₂-[adenosine deaminase]-[Cas9 domain]-[cytidine deaminase]-COOH;
[0499] NH₂-[adenosine deaminase]-[cytidine deaminase]-[Cas9 domain]-COOH;
[0500] NH₂-[cytidine deaminase]-[adenosine deaminase]-[Cas9 domain]-COOH;
[0501] NH₂-[Cas9 domain]-[adenosine deaminase]-[cytidine deaminase]-COOH;
[0502] NH₂-[Cas9 domain]-[cytidine deaminase]-[adenosine deaminase]-COOH;
[0503] NH₂-[adenosine deaminase]-[Cas9 domain]-COOH;
[0504] NH₂-[Cas9 domain]-[adenosine deaminase]-COOH;
[0505] NH₂-[cytidine deaminase]-[Cas9 domain]-COOH; or
[0506] NH2-[Cas9 domain]-[cytidine deaminase]-COOH.

[0507] In some embodiments, the fusion proteins comprising a cytidine deaminase, abasic editor, and adenosine deaminase and a napDNAbp (e.g., Cas9 domain) do not include a linker sequence. In some embodiments, a linker is present between the cytidine deaminase and/or adenosine deaminase domains and the napDNAbp. In some embodiments, the “-” used in the general architecture above indicates the presence of an optional linker. In some embodiments, the cytidine deaminase and adenosine deaminase and the napDNAbp are fused via any of the linkers provided herein. For example, in some embodiments the cytidine deaminase and/or adenosine deaminase and the napDNAbp are fused via any of the linkers provided herein.

### Fusion Proteins Comprising a Nuclear Localization Sequence (NIS)

[0508] In some embodiments, the fusion proteins provided herein further comprise one or more (e.g., 2, 3, 4, 5) nuclear targeting sequences, for example a nuclear localization sequence (NLS). In one embodiment, a bipartite NLS is used. In some embodiments, a NLS comprises an amino acid sequence that facilitates the importation of a protein, that comprises an NLS, into the cell nucleus (e.g., by nuclear transport). In some embodiments, any of the fusion proteins provided herein further comprise a nuclear localization sequence (NLS). In some embodiments, the NLS is fused to the N-terminus of the fusion protein. In some embodiments, the NLS is fused to the C-terminus of the fusion protein. In some embodiments, the NLS is fused to the N-terminus of the Cas9 domain. In some embodiments, the NLS is fused to the C-terminus of an nCas9 domain or a dCas9 domain. In some embodiments, the NLS is fused to the N-terminus of the deaminase. In some embodiments, the NLS is fused to the C-terminus of the deaminase. In some embodiments, the NLS is fused to the fusion protein via one or more linkers. In some embodiments, the NLS is fused to the fusion protein without a linker. In some embodiments, the NLS comprises an amino acid sequence of any one of the NLS sequences provided or referenced herein. Additional nuclear localization sequences are known in the art and would be apparent to the skilled artisan. For example, NLS sequences are described in Plank et al., PCT/EP2000/011690, the contents of which are incorporated herein by reference for their disclosure of exemplary nuclear localization sequences. In some embodiments, an NLS comprises the amino acid sequence PKKKRKVEGADKRTADGSEFESPKKKRKV, KRTADGSEFESPKKKRKV, KRPAATKKAGQAKKKK, KKTELQTTNAENKTKKL, KRGINDRNFWRGENGRKTR, RKSGKIAAIVVKRPRKPKKKRKV, or MDSLLMNRRKFLYQFKNVRWAKGRRETYLC.

[0509] In some embodiments, the NLS is present in a linker or the NLS is flanked by linkers, for example, the linkers described herein. In some embodiments, the N-terminus or C-terminus NLS is a bipartite NLS. A bipartite NLS comprises two basic amino acid clusters, which are separated by a relatively short spacer sequence (hence bipartite—2 parts, while monopartite NLSs are not). The NLS of nucleoplasmin, KR[PAATKKAGQA]KKKK, is the prototype of the ubiquitous bipartite signal: two clusters of basic amino acids, separated by a spacer of about 10 amino acids. The sequence of an exemplary bipartite NLS follows:

PKKKRKVEGADKRTADGSEFESPKKKRKV

[0510] In some embodiments, the fusion proteins of the invention do not comprise a linker sequence. In some embodiments, linker sequences between one or more of the domains or proteins are present. In some embodiments, the general architecture of exemplary Cas9 fusion proteins with an adenosine deaminase or cytidine deaminase and a Cas9 domain comprises any one of the following structures, where NLS is a nuclear localization sequence (e.g., any NLS provided herein), NH₂ is the N-terminus of the fusion protein, and COOH is the C-terminus of the fusion protein:
[0511] NH₂-NLS-[adenosine deaminase]-[Cas9 domain]-COOH;
[0512] NH₂—NLS [Cas9 domain]-[adenosine deaminase]-COOH;
[0513] NH₂-[adenosine deaminase]-[Cas9 domain]-NLS—COOH;
[0514] NH₂-[Cas9 domain]-[adenosine deaminase]-NLS—COOH;
[0515] NH₂-NLS-[cytidine deaminase]-[Cas9 domain]-COOH;
[0516] NH₂—NLS [Cas9 domain]-[cytidine deaminase]-COOH;
[0517] NH₂-[cytidine deaminase]-[Cas9 domain]-NLS—COOH; or
[0518] NH₂-[Cas9 domain]-[cytidine deaminase]-NLS—COOH.

[0519] It should be appreciated that the fusion proteins of the present disclosure may comprise one or more additional features. For example, in some embodiments, the fusion protein may comprise inhibitors, cytoplasmic localization sequences, export sequences, such as nuclear export sequences, or other localization sequences, as well as sequence tags that are useful for solubilization, purification, or detection of the fusion proteins. Suitable protein tags provided herein include, but are not limited to, biotin carboxylase carrier protein (BCCP) tags, myc-tags, calmodulin-tags, FLAG-tags, hemagglutinin (HA)-tags, polyhistidine tags, also referred to as histidine tags or His-tags, maltose binding protein (MBP)-tags, nus-tags, glutathione-S-transferase (GST)-tags, green fluorescent protein (GFP)-tags, thioredoxin-tags, S-tags, Softags (e.g., Softag 1, Softag 3), strep-tags, biotin ligase tags, FlAsH tags, V5 tags, and SBP-tags. Additional suitable sequences will be apparent to those of skill in the art. In some embodiments, the fusion protein comprises one or more His tags.

[0520] A vector that encodes a CRISPR enzyme comprising one or more nuclear localization sequences (NLSs) can be used. For example, there can be or be about 1, 2, 3, 4, 5, 6, 7, 8, 9, 10 NLSs used. A CRISPR enzyme can comprise the NLSs at or near the ammo-terminus, about or more than about 1, 2, 3, 4, 5, 6, 7, 8, 9, 10 NLSs at or near the carboxy-terminus, or any combination of these (e.g., one or more NLS at the ammo-terminus and one or more NLS at the carboxy terminus). When more than one NLS is present, each can be selected independently of others, such that a single NLS can be present in more than one copy and/or in combination with one or more other NLSs present in one or more copies.

[0521] CRISPR enzymes used in the methods can comprise about 6 NLSs. An NLS is considered near the N- or C-terminus when the nearest amino acid to the NLS is within about 50 amino acids along a polypeptide chain from the N- or C-terminus, e.g., within 1, 2, 3, 4, 5, 10, 15, 20, 25, 30, 40, or 50 amino acids.

### Nucleobase Editing Domain

[0522] Described herein are base editors comprising a fusion protein that includes a polynucleotide programmable nucleotide binding domain and a nucleobase editing domain (e.g., a deaminase domain). The base editor can be programmed to edit one or more bases in a target polynucleotide sequence by interacting with a guide polynucleotide capable of recognizing the target sequence. Once the target sequence has been recognized, the base editor is anchored on the polynucleotide where editing is to occur and the deaminase domain components of the base editor can then edit a target base.

[0523] In some embodiments, the nucleobase editing domain includes a deaminase domain. As particularly described herein, the deaminase domain includes a cytosine deaminase or an adenosine deaminase. In some embodiments, the terms “cytosine deaminase” and “cytidine deaminase” can be used interchangeably. In some embodiments, the terms “adenine deaminase” and “adenosine deaminase” can be used interchangeably. Details of nucleobase editing proteins are described in International PCT Application Nos. PCT/2017/045381 (WO2018/027078) and PCT/US2016/058344 (WO2017/070632), each of which is incorporated herein by reference for its entirety. Also see Komor, A. C., et al., “Programmable editing of a target base in genomic DNA without double-stranded DNA cleavage” Nature 533, 420-424 (2016); Gaudelli, N. M., et al., “Programmable base editing of A⋅T to G⋅C in genomic DNA without DNA cleavage” Nature 551, 464-471 (2017); and Komor, A. C., et al., “Improved base excision repair inhibition and bacteriophage Mu Gam protein yields C:G-to-T:A base editors with higher efficiency and product purity” Science Advances 3:eaao4774 (2017), the entire contents of which are hereby incorporated by reference.

### A to G Editing

[0524] In some embodiments, a base editor described herein can comprise a deaminase domain which includes an adenosine deaminase. Such an adenosine deaminase domain of a base editor can facilitate the editing of an adenine (A) nucleobase to a guanine (G) nucleobase by deaminating the A to form inosine (I), which exhibits base pairing properties of G. Adenosine deaminase is capable of deaminating (i.e., removing an amine group) adenine of a deoxyadenosine residue in deoxyribonucleic acid (DNA).

[0525] In some embodiments, the nucleobase editors provided herein can be made by fusing together one or more protein domains, thereby generating a fusion protein. In certain embodiments, the fusion proteins provided herein comprise one or more features that improve the base editing activity (e.g., efficiency, selectivity, and specificity) of the fusion proteins. For example, the fusion proteins provided herein can comprise a Cas9 domain that has reduced nuclease activity. In some embodiments, the fusion proteins provided herein can have a Cas9 domain that does not have nuclease activity (dCas9), or a Cas9 domain that cuts one strand of a duplexed DNA molecule, referred to as a Cas9 nickase (nCas9). Without wishing to be bound by any particular theory, the presence of the catalytic residue (e.g., H840) maintains the activity of the Cas9 to cleave the non-edited (e.g., non-deaminated) strand containing a T opposite the targeted A. Mutation of the catalytic residue (e.g., D10 to A10) of Cas9 prevents cleavage of the edited strand containing the targeted A residue. Such Cas9 variants are able to generate a single-strand DNA break (nick) at a specific location based on the gRNA-defined target sequence, leading to repair of the non-edited strand, ultimately resulting in a T to C change on the non-edited strand. In some embodiments, an A-to-G base editor further comprises an inhibitor of inosine base excision repair, for example, a uracil glycosylase inhibitor (UGI) domain or a catalytically inactive inosine specific nuclease. Without wishing to be bound by any particular theory, the UGI domain or catalytically inactive inosine specific nuclease can inhibit or prevent base excision repair of a deaminated adenosine residue (e.g., inosine), which can improve the activity or efficiency of the base editor.

[0526] A base editor comprising an adenosine deaminase can act on any polynucleotide, including DNA, RNA and DNA-RNA hybrids. In certain embodiments, a base editor comprising an adenosine deaminase can deaminate a target A of a polynucleotide comprising RNA. For example, the base editor can comprise an adenosine deaminase domain capable of deaminating a target A of an RNA polynucleotide and/or a DNA-RNA hybrid polynucleotide. In an embodiment, an adenosine deaminase incorporated into a base editor comprises all or a portion of adenosine deaminase acting on RNA (ADAR, e.g., ADAR1 or ADAR2). In another embodiment, an adenosine deaminase incorporated into a base editor comprises all or a portion of adenosine deaminase acting on tRNA (ADAT). A base editor comprising an adenosine deaminase domain can also be capable of deaminating an A nucleobase of a DNA polynucleotide. In an embodiment an adenosine deaminase domain of a base editor comprises all or a portion of an ADAT comprising one or more mutations which permit the ADAT to deaminate a target A in DNA. For example, the base editor can comprise all or a portion of an ADAT from Escherichia coli (EcTadA) comprising one or more of the following mutations: D108N, A106V, D147Y, E155V, L84F, H123Y, I156F, or a corresponding mutation in another adenosine deaminase.

[0527] The adenosine deaminase can be derived from any suitable organism (e.g., E. coli). In some embodiments, the adenine deaminase is a naturally-occurring adenosine deaminase that includes one or more mutations corresponding to any of the mutations provided herein (e.g., mutations in ecTadA). The corresponding residue in any homologous protein can be identified by e.g., sequence alignment and determination of homologous residues. The mutations in any naturally-occurring adenosine deaminase (e.g., having homology to ecTadA) that corresponds to any of the mutations described herein (e.g., any of the mutations identified in ecTadA) can be generated accordingly.

### Adenosine Deaminases

[0528] In some embodiments, a base editor described herein can comprise a deaminase domain which includes an adenosine deaminase. Such an adenosine deaminase domain of a base editor can facilitate the editing of an adenine (A) nucleobase to a guanine (G) nucleobase by deaminating the A to form inosine (I), which exhibits base pairing properties of G. Adenosine deaminase is capable of deaminating (i.e., removing an amine group) adenine of a deoxyadenosine residue in deoxyribonucleic acid (DNA).

[0529] In some embodiments, the adenosine deaminases provided herein are capable of deaminating adenine. In some embodiments, the adenosine deaminases provided herein are capable of deaminating adenine in a deoxyadenosine residue of DNA. In some embodiments, the adenine deaminase is a naturally-occurring adenosine deaminase that includes one or more mutations corresponding to any of the mutations provided herein (e.g., mutations in ecTadA). One of skill in the art will be able to identify the corresponding residue in any homologous protein, e.g., by sequence alignment and determination of homologous residues. Accordingly, one of skill in the art would be able to generate mutations in any naturally-occurring adenosine deaminase (e.g., having homology to ecTadA) that corresponds to any of the mutations described herein, e.g., any of the mutations identified in ecTadA. In some embodiments, the adenosine deaminase is from a prokaryote. In some embodiments, the adenosine deaminase is from a bacterium. In some embodiments, the adenosine deaminase is from Escherichia coli, Staphylococcus aureus, Salmonella typhi, Shewanella putrefaciens, Haemophilus influenzae, Caulobacter crescentus, or Bacillus subtilis. In some embodiments, the adenosine deaminase is from E. coli.

[0530] The invention provides adenosine deaminase variants that have increased efficiency (>50-60%) and specificity. In particular, the adenosine deaminase variants described herein are more likely to edit a desired base within a polynucleotide, and are less likely to edit bases that are not intended to be altered in the base editing window (i.e., “bystanders”).

[0531] In particular embodiments, the TadA is any one of the TadA described in PCT/US2017/045381 (WO 2018/027078), which is incorporated herein by reference in its entirety.

[0532] In some embodiments, the nucleobase editors of the invention are adenosine deaminase variants comprising an alteration in the following sequence:

MSEVEFSHEYWMRHALTLAKRARDEREVPVGAVLVLNNRVIGEGWNRAIGL
HDPTAHAEIMALRQGGLVMQNYRLIDATLYVTFEPCVMCAGAMIHSRIGRV
VFGVRNAKTGAAGSLMDVLHYPGMNHRVEITEGILADECAALLCYFFRMPR
QVFNAQKKAQSSTD.
(also termed TadA*7.10)

[0533] In particular embodiments, the fusion proteins comprise a single (e.g., provided as a monomer) TadA*8 variant. In some embodiments, the TadA*8 is linked to a Cas9 nickase. In some embodiments, the fusion proteins of the invention comprise as a heterodimer of a wild-type TadA (TadA(wt)) linked to a TadA*8 variant. In other embodiments, the fusion proteins of the invention comprise as a heterodimer of a TadA*7.10 linked to a TadA*8 variant. In some embodiments, the base editor is ABE8 comprising a TadA*8 variant monomer. In some embodiments, the base editor is ABE8 comprising a heterodimer of a TadA*8 variant and a TadA(wt). In some embodiments, the base editor is ABE8 comprising a heterodimer of a TadA*8 variant and TadA*7.10. In some embodiments, the base editor is ABE8 comprising a heterodimer of a TadA*8 variant. In some embodiments, the TadA*8 variant is selected from Table 7. In some embodiments, the ABE8 is selected from Table 7.

[0534] The relevant sequences follow:

Wild-type TadA (TadA(wt)) or “the TadA reference sequence”

MSEVEFSHEYWMRHALTLAKRAWDEREVPVGAVLVHNNRVIGEGWNRPIGR
HDPTAHAEIMALRQGGLVMQNYRLIDATLYVTLEPCVMCAGAMIHSRIGRV
VFGARDAKTGAAGSLMDVLHHPGMNHRVEITEGILADECAALLSDFFRMRR
QEIKAQKKAQSSTD

### TadA*7.10:

MSEVEFSHEYW MRHALTLAKR ARDEREVPVG AVLVLNNRVI
GEGWNRAIGL HDPTAHAEIM ALRQGGLVMQ NYRLIDATLY
VTFEPCVMCA GAMIHSRIGR VVFGVRNAKT GAAGSLMDVL
HYPGMNHRVE ITEGILADEC AALLCYFFRM PRQVFNAQKK
AQSSTD

[0536] In some embodiments, the adenosine deaminase comprises an amino acid sequence that is at least 60%, at least 65%, at least 70%, at least 75%, at least 80%, at least 85%, at least 90%, at least 95%, at least 96%, at least 97%, at least 98%, at least 99%, or at least 99.5% identical to any one of the amino acid sequences set forth in any of the adenosine deaminases provided herein. It should be appreciated that adenosine deaminases provided herein may include one or more mutations (e.g., any of the mutations provided herein). The disclosure provides any deaminase domains with a certain percent identity plus any of the mutations or combinations thereof described herein. In some embodiments, the adenosine deaminase comprises an amino acid sequence that has 1, 2, 3, 4, 5, 6, 7, 8, 9, 10, 11, 12, 13, 14, 15, 16, 17, 18, 19, 20, 21, 22, 21, 24, 25, 26, 27, 28, 29, 30, 31, 32, 33, 34, 35, 36, 37, 38, 39, 40, 41, 42, 43, 44, 45, 46, 47, 48, 49, 50, or more mutations compared to a reference sequence, or any of the adenosine deaminases provided herein. In some embodiments, the adenosine deaminase comprises an amino acid sequence that has at least 5, at least 10, at least 15, at least 20, at least 25, at least 30, at least 35, at least 40, at least 45, at least 50, at least 60, at least 70, at least 80, at least 90, at least 100, at least 110, at least 120, at least 130, at least 140, at least 150, at least 160, or at least 170 identical contiguous amino acid residues as compared to any one of the amino acid sequences known in the art or described herein.

[0537] In some embodiments the TadA deaminase is a full-length E. coli TadA deaminase. For example, in certain embodiments, the adenosine deaminase comprises the amino acid sequence:

MRRAFITGVFFLSEVEFSHEYWMRHALTLAKRAWDEREVPVGAVLVHNNRV
IGEGWNRPIGRHDPTAHAEIMALRQGGLVMQNYRLIDATLYVTLEPCVMCA
GAMIHSRIGRVVFGARDAKTGAAGSLMDVLHHPGMNHRVEITEGILADECA
ALLSDFFRMRRQEIKAQKKAQSSTD.

[0538] It should be appreciated, however, that additional adenosine deaminases useful in the present application would be apparent to the skilled artisan and are within the scope of this disclosure. For example, the adenosine deaminase may be a homolog of adenosine deaminase acting on tRNA (ADAT). Without limitation, the amino acid sequences of exemplary AD AT homologs include the following:

Staphylococcus aureus TadA:

MGSHMTNDIYFMTLAIEEAKKAAQLGEVPIGAIITKDDEVIARAHNLRETL
QQPTAHAEHIAIERAAKVLGSWRLEGCTLYVTLEPCVMCAGTIVMSRIPRV
VYGADDPKGGCSGSLMNLLQQSNFNHRAIVDKGVLKEACSTLLTTFFKNLR
ANKKSTN

Bacillus subtilis TadA:

MTQDELYMKEAIKEAKKAEEKGEVPIGAVLVINGEIIARAHNLRETEQRSI
AHAEMLVIDEACKALGTWRLEGATLYVTLEPCPMCAGAVVLSRVEKVVFGA
FDPKGGCSGTLMNLLQEERFNHQAEVVSGVLEEECGGMLSAFFRELRKKKK
AARKNLSE

Salmonella typhimurium (S. typhimurium) TadA:

MPPAFITGVTSLSDVELDHEYWMRHALTLAKRAWDEREVPVGAVLVHNHRV
IGEGWNRPIGRHDPTAHAEIMALRQGGLVLQNYRLLDTTLYVTLEPCVMCA
GAMVHSRIGRVVFGARDAKTGAAGSLIDVLHHPGMNHRVEIIEGVLRDECA
TLLSDFFRMRRQEIKALKKADRAEGAGPAV

Shewanella putrefaciens (S. putrefaciens) TadA:

MDEYWMQVAMQMAEKAEAAGEVPVGAVLVKDGQQIATGYNLSISQHDPTAH
AEILCLRSAGKKLENYRLLDATLYITLEPCAMCAGAMVHSRIARVVYGARD
EKTGAAGTVVNLLQHPAFNHQVEVTSGVLAEACSAQLSRFFKRRRDEKKAL
KLAQRAQQGIE

Haemophilus influenzae F3031 (H. influenzae) TadA:

MDAAKVRSEFDEKMMRYALELADKAEALGEIPVGAVLVDDARNIIGEGWNL
SIVQSDPTAHAEIIALRNGAKNIQNYRLLNSTLYVTLEPCTMCAGAILHSR
IKRLVFGASDYKTGAIGSRFHFFDDYKMNHTLEITSGVLAEECSQKLSTFF
QKRREEKKIEKALLKSLSDK

Caulobacter crescentus (C. crescentus) TadA:

MRTDESEDQDHRMMRLALDAARAAAEAGETPVGAVILDPSTGEVIATAGNG
PIAAHDPTAHAEIAAMRAAAAKLGNYRLTDLTLVVTLEPCAMCAGAISHAR
IGRVVFGADDPKGGAVVHGPKFFAQPTCHWRPEVTGGVLADESADLLRGFF
RARRKAKI

Geobacter sulfurreducens (G. sulfurreducens) TadA:

MSSLKKTPIRDDAYWMGKAIREAAKAAARDEVPIGAVIVRDGAVIGRGHNL
REGSNDPSAHAEMIAIRQAARRSANWRLTGATLYVTLEPCLMCMGAIILAR
LERVVFGCYDPKGGAAGSLYDLSADPRLNHQVRLSPGVCQEECGTMLSDFF
RDLRRRKKAKATPALFIDERKVPPEP

[0539] An embodiment of E. Coli TadA (ecTadA) includes the following:

MSEVEFSHEYWMRHALTLAKRARDEREVPVGAVLVLNNRVIGEGWNRAIGL
HDPTAHAEIMALRQGGLVMQNYRLIDATLYVTFEPCVMCAGAMIHSRIGRV
VFGVRNAKTGAAGSLMDVLHYPGMNHRVEITEGILADECAALLCYFFRMPR
QVFNAQKKAQSSTD

[0540] In some embodiments, the adenosine deaminase is from a prokaryote. In some embodiments, the adenosine deaminase is from a bacterium. In some embodiments, the adenosine deaminase is from Escherichia coli, Staphylococcus aureus, Salmonella typhi, Shewanella putrefaciens, Haemophilus influenzae, Caulobacter crescentus, or Bacillus subtilis. In some embodiments, the adenosine deaminase is from E. coli.

[0541] In one embodiment, a fusion protein of the invention comprises a wild-type TadA linked to TadA7.10, which is linked to Cas9 nickase. In particular embodiments, the fusion proteins comprise a single TadA7.10 domain (e.g., provided as a monomer). In other embodiments, the ABE7.10 editor comprises TadA7.10 and TadA(wt), which are capable of forming heterodimers.

[0542] In some embodiments, the adenosine deaminase comprises an amino acid sequence that is at least 60%, at least 65%, at least 70%, at least 75%, at least 80%, at least 85%, at least 90%, at least 95%, at least 96%, at least 97%, at least 98%, at least 99%, or at least 99.5% identical to any one of the amino acid sequences set forth in any of the adenosine deaminases provided herein. It should be appreciated that adenosine deaminases provided herein may include one or more mutations (e.g., any of the mutations provided herein). The disclosure provides any deaminase domains with a certain percent identity plus any of the mutations or combinations thereof described herein. In some embodiments, the adenosine deaminase comprises an amino acid sequence that has 1, 2, 3, 4, 5, 6, 7, 8, 9, 10, 11, 12, 13, 14, 15, 16, 17, 18, 19, 20, 21, 22, 21, 24, 25, 26, 27, 28, 29, 30, 31, 32, 33, 34, 35, 36, 37, 38, 39, 40, 41, 42, 43, 44, 45, 46, 47, 48, 49, 50, or more mutations compared to a reference sequence, or any of the adenosine deaminases provided herein. In some embodiments, the adenosine deaminase comprises an amino acid sequence that has at least 5, at least 10, at least 15, at least 20, at least 25, at least 30, at least 35, at least 40, at least 45, at least 50, at least 60, at least 70, at least 80, at least 90, at least 100, at least 110, at least 120, at least 130, at least 140, at least 150, at least 160, or at least 170 identical contiguous amino acid residues as compared to any one of the amino acid sequences known in the art or described herein.

[0543] It should be appreciated that any of the mutations provided herein (e.g., based on the TadA reference sequence) can be introduced into other adenosine deaminases, such as E. coli TadA (ecTadA), S. aureus TadA (saTadA), or other adenosine deaminases (e.g., bacterial adenosine deaminases). It would be apparent to the skilled artisan that additional deaminases may similarly be aligned to identify homologous amino acid residues that can be mutated as provided herein. Thus, any of the mutations identified in the TadA reference sequence can be made in other adenosine deaminases (e.g., ecTada) that have homologous amino acid residues. It should also be appreciated that any of the mutations provided herein can be made individually or in any combination in the TadA reference sequence or another adenosine deaminase.

[0544] In some embodiments, the adenosine deaminase comprises a D108X mutation in the TadA reference sequence, or a corresponding mutation in another adenosine deaminase (e.g., ecTadA), where X indicates any amino acid other than the corresponding amino acid in the wild-type adenosine deaminase. In some embodiments, the adenosine deaminase comprises a D108G, D108N, D108V, D108A, or D108Y mutation, or a corresponding mutation in another adenosine deaminase.

[0545] In some embodiments, the adenosine deaminase comprises an A106X mutation in TadA reference sequence, or a corresponding mutation in another adenosine deaminase (e.g., ecTadA), where X indicates any amino acid other than the corresponding amino acid in the wild-type adenosine deaminase. In some embodiments, the adenosine deaminase comprises an A106V mutation in TadA reference sequence, or a corresponding mutation in another adenosine deaminase (e.g., wild-type TadA or ecTadA).

[0546] In some embodiments, the adenosine deaminase comprises a E155X mutation in TadA reference sequence, or a corresponding mutation in another adenosine deaminase (e.g., ecTadA), where the presence of X indicates any amino acid other than the corresponding amino acid in the wild-type adenosine deaminase. In some embodiments, the adenosine deaminase comprises a E155D, E155G, or E155V mutation in TadA reference sequence, or a corresponding mutation in another adenosine deaminase (e.g., ecTadA).

[0547] In some embodiments, the adenosine deaminase comprises a D147X mutation in TadA reference sequence, or a corresponding mutation in another adenosine deaminase (e.g., ecTadA), where the presence of X indicates any amino acid other than the corresponding amino acid in the wild-type adenosine deaminase. In some embodiments, the adenosine deaminase comprises a D147Y, mutation in TadA reference sequence, or a corresponding mutation in another adenosine deaminase (e.g., ecTadA).

[0548] In some embodiments, the adenosine deaminase comprises an A106X, E155X, or D147X, mutation in the TadA reference sequence, or a corresponding mutation in another adenosine deaminase (e.g., ecTadA), where X indicates any amino acid other than the corresponding amino acid in the wild-type adenosine deaminase. In some embodiments, the adenosine deaminase comprises an E155D, E155G, or E155V mutation. In some embodiments, the adenosine deaminase comprises a D147Y.

[0549] For example, an adenosine deaminase can contain a D108N, a A106V, a E155V, and/or a D147Y mutation in TadA reference sequence, or a corresponding mutation in another adenosine deaminase (e.g., ecTadA). In some embodiments, an adenosine deaminase comprises the following group of mutations (groups of mutations are separated by a “;”) in TadA reference sequence, or corresponding mutations in another adenosine deaminase (e.g., ecTadA): D108N and A106V; D108N and E155V; D108N and D147Y; A106V and E155V; A106V and D147Y; E155V and D147Y; D108N, A106V, and E155V; D108N, A106V, and D147Y; D108N, E155V, and D147Y; A106V, E155V, and D 147Y; and D108N, A106V, E155V, and D147Y. It should be appreciated, however, that any combination of corresponding mutations provided herein can be made in an adenosine deaminase (e.g., ecTadA).

[0550] In some embodiments, the adenosine deaminase comprises one or more of a H8X, T17X, L18X, W23X, L34X, W45X, R51X, A56X, E59X, E85X, M94X, I95X, V102X, F104X, A106X, R107X, D108X, K110X, M118X, N127X, A138X, F149X, M151X, R153X, Q154X, I156X, and/or K157X mutation in TadA reference sequence, or one or more corresponding mutations in another adenosine deaminase (e.g., ecTadA), where the presence of X indicates any amino acid other than the corresponding amino acid in the wild-type adenosine deaminase. In some embodiments, the adenosine deaminase comprises one or more of H8Y, T17S, L18E, W23L, L34S, W45L, R51H, A56E, or A56S, E59G, E85K, or E85G, M94L, 1951, V102A, F104L, A106V, R107C, or R107H, or R107P, D108G, or D108N, or D108V, or D108A, or D108Y, K110I, M118K, N127S, A138V, F149Y, M151V, R153C, Q154L, I156D, and/or K157R mutation in TadA reference sequence, or one or more corresponding mutations in another adenosine deaminase (e.g., ecTadA).

[0551] In some embodiments, the adenosine deaminase comprises one or more of a H8X, D108X, and/or N127X mutation in TadA reference sequence, or one or more corresponding mutations in another adenosine deaminase (e.g., ecTadA), where X indicates the presence of any amino acid. In some embodiments, the adenosine deaminase comprises one or more of a H8Y, D108N, and/or N127S mutation in TadA reference sequence, or one or more corresponding mutations in another adenosine deaminase (e.g., ecTadA).

[0552] In some embodiments, the adenosine deaminase comprises one or more of H8X, R26X, M61X, L68X, M70X, A106X, D108X, A109X, N127X, D147X, R152X, Q154X, E155X, K161X, Q163X, and/or T166X mutation in TadA reference sequence, or one or more corresponding mutations in another adenosine deaminase (e.g., ecTadA), where X indicates the presence of any amino acid other than the corresponding amino acid in the wild-type adenosine deaminase. In some embodiments, the adenosine deaminase comprises one or more of H8Y, R26W, M61L, L68Q, M70V, A106T, D108N, A109T, N127S, D147Y, R152C, Q154H or Q154R, E155G or E155V or E155D, K161Q, Q163H, and/or T166P mutation in TadA reference sequence, or one or more corresponding mutations in another adenosine deaminase (e.g., ecTadA).

[0553] In some embodiments, the adenosine deaminase comprises one, two, three, four, five, or six mutations selected from the group consisting of H8X, D108X, N127X, D147X, R152X, and Q154X in TadA reference sequence, or a corresponding mutation or mutations in another adenosine deaminase (e.g., ecTadA), where X indicates the presence of any amino acid other than the corresponding amino acid in the wild-type adenosine deaminase. In some embodiments, the adenosine deaminase comprises one, two, three, four, five, six, seven, or eight mutations selected from the group consisting of H8X, M61X, M70X, D108X, N127X, Q154X, E155X, and Q163X in TadA reference sequence, or a corresponding mutation or mutations in another adenosine deaminase (e.g., ecTadA), where X indicates the presence of any amino acid other than the corresponding amino acid in the wild-type adenosine deaminase. In some embodiments, the adenosine deaminase comprises one, two, three, four, or five, mutations selected from the group consisting of H8X, D108X, N127X, E155X, and T166X in TadA reference sequence, or a corresponding mutation or mutations in another adenosine deaminase (e.g., ecTadA), where X indicates the presence of any amino acid other than the corresponding amino acid in the wild-type adenosine deaminase.

[0554] In some embodiments, the adenosine deaminase comprises one, two, three, four, five, or six mutations selected from the group consisting of H8X, A106X, D108X, mutation or mutations in another adenosine deaminase, where X indicates the presence of any amino acid other than the corresponding amino acid in the wild-type adenosine deaminase. In some embodiments, the adenosine deaminase comprises one, two, three, four, five, six, seven, or eight mutations selected from the group consisting of H8X, R126X, L68X, D108X, N127X, D147X, and E155X, or a corresponding mutation or mutations in another adenosine deaminase, where X indicates the presence of any amino acid other than the corresponding amino acid in the wild-type adenosine deaminase. In some embodiments, the adenosine deaminase comprises one, two, three, four, or five, mutations selected from the group consisting of H8X, D108X, A109X, N127X, and E155X in TadA reference sequence, or a corresponding mutation or mutations in another adenosine deaminase (e.g., ecTadA), where X indicates the presence of any amino acid other than the corresponding amino acid in the wild-type adenosine deaminase.

[0555] In some embodiments, the adenosine deaminase comprises one, two, three, four, five, or six mutations selected from the group consisting of H8Y, D108N, N127S, D147Y, R152C, and Q154H in TadA reference sequence, or a corresponding mutation or mutations in another adenosine deaminase (e.g., ecTadA). In some embodiments, the adenosine deaminase comprises one, two, three, four, five, six, seven, or eight mutations selected from the group consisting of H8Y, M61I, M70V, D108N, N127S, Q154R, E155G and Q163H in TadA reference sequence, or a corresponding mutation or mutations in another adenosine deaminase (e.g., ecTadA). In some embodiments, the adenosine deaminase comprises one, two, three, four, or five, mutations selected from the group consisting of H8Y, D108N, N127S, E155V, and T166P in TadA reference sequence, or a corresponding mutation or mutations in another adenosine deaminase (e.g., ecTadA). In some embodiments, the adenosine deaminase comprises one, two, three, four, five, or six mutations selected from the group consisting of H8Y, A106T, D108N, N127S, E155D, and K161Q in TadA reference sequence, or a corresponding mutation or mutations in another adenosine deaminase (e.g., ecTadA). In some embodiments, the adenosine deaminase comprises one, two, three, four, five, six, seven, or eight mutations selected from the group consisting of H8Y, R126W, L68Q, D108N, N127S, D147Y, and E155V in TadA reference sequence, or a corresponding mutation or mutations in another adenosine deaminase (e.g., ecTadA). In some embodiments, the adenosine deaminase comprises one, two, three, four, or five, mutations selected from the group consisting of H8Y, D108N, A109T, N127S, and E155G in TadA reference sequence, or a corresponding mutation or mutations in another adenosine deaminase (e.g., ecTadA).

[0556] Any of the mutations provided herein and any additional mutations (e.g., based on the ecTadA amino acid sequence) can be introduced into any other adenosine deaminases. Any of the mutations provided herein can be made individually or in any combination in TadA reference sequence or another adenosine deaminase (e.g., ecTadA).

[0557] Details of A to G nucleobase editing proteins are described in International PCT Application No. PCT/2017/045381 (WO2018/027078) and Gaudelli, N. M., et al., “Programmable base editing of A⋅T to G⋅C in genomic DNA without DNA cleavage” Nature, 551, 464-471 (2017), the entire contents of which are hereby incorporated by reference.

[0558] In some embodiments, the adenosine deaminase comprises one or more corresponding mutations in another adenosine deaminase (e.g., ecTadA). In some embodiments, the adenosine deaminase comprises a D108N, D108G, or D108V mutation in TadA reference sequence, or corresponding mutations in another adenosine deaminase (e.g., ecTadA). In some embodiments, the adenosine deaminase comprises a A106V and D108N mutation in TadA reference sequence, or corresponding mutations in another adenosine deaminase (e.g., ecTadA). In some embodiments, the adenosine deaminase comprises R107C and D108N mutations in TadA reference sequence, or corresponding mutations in another adenosine deaminase (e.g., ecTadA). In some embodiments, the adenosine deaminase comprises a H8Y, D108N, N127S, D147Y, and Q154H mutation in TadA reference sequence, or corresponding mutations in another adenosine deaminase (e.g., ecTadA). In some embodiments, the adenosine deaminase comprises a H8Y, D108N, N127S, D147Y, and E155V mutation in TadA reference sequence, or corresponding mutations in another adenosine deaminase (e.g., ecTadA). In some embodiments, the adenosine deaminase comprises a D108N, D147Y, and E155V mutation in TadA reference sequence, or corresponding mutations in another adenosine deaminase (e.g., ecTadA). In some embodiments, the adenosine deaminase comprises a H8Y, D108N, and N127S mutation in TadA reference sequence, or corresponding mutations in another adenosine deaminase (e.g., ecTadA). In some embodiments, the adenosine deaminase comprises a A106V, D108N, D147Y and E155V mutation in TadA reference sequence, or corresponding mutations in another adenosine deaminase (e.g., ecTadA).

[0559] In some embodiments, the adenosine deaminase comprises one or more of a S2X, H8X, I49X, L84X, H123X, N127X, I156X and/or K160X mutation in TadA reference sequence, or one or more corresponding mutations in another adenosine deaminase, where the presence of X indicates any amino acid other than the corresponding amino acid in the wild-type adenosine deaminase. In some embodiments, the adenosine deaminase comprises one or more of S2A, H8Y, I49F, L84F, H123Y, N127S, I156F and/or K160S mutation in TadA reference sequence, or one or more corresponding mutations in another adenosine deaminase (e.g., ecTadA).

[0560] In some embodiments, the adenosine deaminase comprises an L84X mutation adenosine deaminase, where X indicates any amino acid other than the corresponding amino acid in the wild-type adenosine deaminase. In some embodiments, the adenosine deaminase comprises an L84F mutation in TadA reference sequence, or a corresponding mutation in another adenosine deaminase (e.g., ecTadA).

[0561] In some embodiments, the adenosine deaminase comprises an H123X mutation in TadA reference sequence, or a corresponding mutation in another adenosine deaminase (e.g., ecTadA), where X indicates any amino acid other than the corresponding amino acid in the wild-type adenosine deaminase. In some embodiments, the adenosine deaminase comprises an H123Y mutation in TadA reference sequence, or a corresponding mutation in another adenosine deaminase (e.g., ecTadA).

[0562] In some embodiments, the adenosine deaminase comprises an I156X mutation in TadA reference sequence, or a corresponding mutation in another adenosine deaminase (e.g., ecTadA), where X indicates any amino acid other than the corresponding amino acid in the wild-type adenosine deaminase. In some embodiments, the adenosine deaminase comprises an I156F mutation in TadA reference sequence, or a corresponding mutation in another adenosine deaminase (e.g., ecTadA).

[0563] In some embodiments, the adenosine deaminase comprises one, two, three, four, five, six, or seven mutations selected from the group consisting of L84X, A106X, D108X, H123X, D147X, E155X, and I156X in TadA reference sequence, or a corresponding mutation or mutations in another adenosine deaminase (e.g., ecTadA), where X indicates the presence of any amino acid other than the corresponding amino acid in the wild-type adenosine deaminase. In some embodiments, the adenosine deaminase comprises one, two, three, four, five, or six mutations selected from the group consisting of S2X, I49X, A106X, D108X, D147X, and E155X in TadA reference sequence, or a corresponding mutation or mutations in another adenosine deaminase (e.g., ecTadA), where X indicates the presence of any amino acid other than the corresponding amino acid in the wild-type adenosine deaminase. In some embodiments, the adenosine deaminase comprises one, two, three, four, or five, mutations selected from the group consisting of H8X, A106X, D108X, N127X, and K160X in TadA reference sequence, or a corresponding mutation or mutations in another adenosine deaminase (e.g., ecTadA), where X indicates the presence of any amino acid other than the corresponding amino acid in the wild-type adenosine deaminase.

[0564] In some embodiments, the adenosine deaminase comprises one, two, three, four, five, six, or seven mutations selected from the group consisting of L84F, A106V, D108N, H123Y, D147Y, E155V, and I156F in TadA reference sequence, or a corresponding mutation or mutations in another adenosine deaminase (e.g., ecTadA). In some embodiments, the adenosine deaminase comprises one, two, three, four, five, or six mutations selected from the group consisting of S2A, I49F, A106V, D108N, D147Y, and E155V in TadA reference sequence.

[0565] In some embodiments, the adenosine deaminase comprises one, two, three, four, or five, mutations selected from the group consisting of H8Y, A106T, D108N, N127S, and K160S in TadA reference sequence, or a corresponding mutation or mutations in another adenosine deaminase (e.g., ecTadA).

[0566] In some embodiments, the adenosine deaminase comprises one or more of a E25X, R26X, R107X, A142X, and/or A143X mutation in TadA reference sequence, or one or more corresponding mutations in another adenosine deaminase (e.g., ecTadA), where the presence of X indicates any amino acid other than the corresponding amino acid in the wild-type adenosine deaminase. In some embodiments, the adenosine deaminase comprises one or more of E25M, E25D, E25A, E25R, E25V, E25S, E25Y, R26G, R26N, R26Q, R26C, R26L, R26K, R107P, R107K, R107A, R107N, R107W, R107H, R107S, A142N, A142D, A142G, A143D, A143G, A143E, A143L, A143W, A143M, A143S, A143Q and/or A143R mutation in TadA reference sequence, or one or more corresponding mutations in another adenosine deaminase (e.g., ecTadA). In some embodiments, the adenosine deaminase comprises one or more of the mutations described herein corresponding to TadA reference sequence, or one or more corresponding mutations in another adenosine deaminase (e.g., ecTadA).

[0567] In some embodiments, the adenosine deaminase comprises an E25X mutation in TadA reference sequence, or a corresponding mutation in another adenosine deaminase (e.g., ecTadA), where X indicates any amino acid other than the corresponding amino acid in the wild-type adenosine deaminase. In some embodiments, the adenosine deaminase comprises an E25M, E25D, E25A, E25R, E25V, E25S, or E25Y mutation in TadA reference sequence, or a corresponding mutation in another adenosine deaminase (e.g., ecTadA).

[0568] In some embodiments, the adenosine deaminase comprises an R26X mutation in TadA reference sequence, or a corresponding mutation in another adenosine deaminase (e.g., ecTadA), where X indicates any amino acid other than the corresponding amino acid in the wild-type adenosine deaminase. In some embodiments, the adenosine deaminase comprises R26G, R26N, R26Q, R26C, R26L, or R26K mutation in TadA reference sequence, or a corresponding mutation in another adenosine deaminase (e.g., ecTadA).

[0569] In some embodiments, the adenosine deaminase comprises an R107X mutation in TadA reference sequence, or a corresponding mutation in another adenosine deaminase (e.g., ecTadA), where X indicates any amino acid other than the corresponding amino acid in the wild-type adenosine deaminase. In some embodiments, the adenosine deaminase comprises an R107P, R107K, R107A, R107N, R107W, R107H, or R107S mutation in TadA reference sequence, or a corresponding mutation in another adenosine deaminase (e.g., ecTadA).

[0570] In some embodiments, the adenosine deaminase comprises an A142X mutation in TadA reference sequence, or a corresponding mutation in another adenosine deaminase (e.g., ecTadA), where X indicates any amino acid other than the corresponding amino acid in the wild-type adenosine deaminase. In some embodiments, the adenosine deaminase comprises an A142N, A142D, A142G, mutation in TadA reference sequence, or a corresponding mutation in another adenosine deaminase (e.g., ecTadA).

[0571] In some embodiments, the adenosine deaminase comprises an A143X mutation in TadA reference sequence, or a corresponding mutation in another adenosine deaminase (e.g., ecTadA), where X indicates any amino acid other than the corresponding amino acid in the wild-type adenosine deaminase. In some embodiments, the adenosine deaminase comprises an A143D, A143G, A143E, A143L, A143W, A143M, A143S, A143Q and/or A143R mutation in TadA reference sequence, or a corresponding mutation in another adenosine deaminase (e.g., ecTadA).

[0572] In some embodiments, the adenosine deaminase comprises one or more of a H36X, N37X, P48X, I49X, R51X, M70X, N72X, D77X, E134X, S 146X, Q154X, K157X, and/or K161X mutation in TadA reference sequence, or one or more corresponding mutations in another adenosine deaminase (e.g., ecTadA), where the presence of X indicates any amino acid other than the corresponding amino acid in the wild-type adenosine deaminase. In some embodiments, the adenosine deaminase comprises one or more of H36L, N37T, N37S, P48T, P48L, I49V, R51H, R51L, M70L, N72S, D77G, E134G, S146R, S146C, Q154H, K157N, and/or K161T mutation in TadA reference sequence, or one or more corresponding mutations in another adenosine deaminase (e.g., ecTadA).

[0573] In some embodiments, the adenosine deaminase comprises an H36X mutation in TadA reference sequence, or a corresponding mutation in another adenosine deaminase (e.g., ecTadA), where X indicates any amino acid other than the corresponding amino acid in the wild-type adenosine deaminase. In some embodiments, the adenosine deaminase comprises an H36L mutation in TadA reference sequence, or a corresponding mutation in another adenosine deaminase (e.g., ecTadA).

[0574] In some embodiments, the adenosine deaminase comprises an N37X mutation in TadA reference sequence, or a corresponding mutation in another adenosine deaminase (e.g., ecTadA), where X indicates any amino acid other than the corresponding amino acid in the wild-type adenosine deaminase. In some embodiments, the adenosine deaminase comprises an N37T, or N37S mutation in TadA reference sequence, or a corresponding mutation in another adenosine deaminase (e.g., ecTadA).

[0575] In some embodiments, the adenosine deaminase comprises an P48X mutation in TadA reference sequence, or a corresponding mutation in another adenosine deaminase (e.g., ecTadA), where X indicates any amino acid other than the corresponding amino acid in the wild-type adenosine deaminase. In some embodiments, the adenosine deaminase comprises an P48T, or P48L mutation in TadA reference sequence, or a corresponding mutation in another adenosine deaminase (e.g., ecTadA).

[0576] In some embodiments, the adenosine deaminase comprises an R51X mutation in TadA reference sequence, or a corresponding mutation in another adenosine deaminase, where X indicates any amino acid other than the corresponding amino acid in the wild-type adenosine deaminase. In some embodiments, the adenosine deaminase comprises an R51H1, or R51L mutation in TadA reference sequence, or a corresponding mutation in another adenosine deaminase (e.g., ecTadA).

[0577] In some embodiments, the adenosine deaminase comprises an S146X mutation in TadA reference sequence, or a corresponding mutation in another adenosine deaminase (e.g., ecTadA), where X indicates any amino acid other than the corresponding amino acid in the wild-type adenosine deaminase. In some embodiments, the adenosine deaminase comprises an S146R, or S146C mutation in TadA reference sequence, or a corresponding mutation in another adenosine deaminase (e.g., ecTadA).

[0578] In some embodiments, the adenosine deaminase comprises an K157X mutation in TadA reference sequence, or a corresponding mutation in another adenosine deaminase (e.g., ecTadA), where X indicates any amino acid other than the corresponding amino acid in the wild-type adenosine deaminase. In some embodiments, the adenosine deaminase comprises a K157N mutation in TadA reference sequence, or a corresponding mutation in another adenosine deaminase (e.g., ecTadA).

[0579] In some embodiments, the adenosine deaminase comprises an P48X mutation in TadA reference sequence, or a corresponding mutation in another adenosine deaminase (e.g., ecTadA), where X indicates any amino acid other than the corresponding amino acid in the wild-type adenosine deaminase. In some embodiments, the adenosine deaminase comprises a P48S, P48T, or P48A mutation in TadA reference sequence, or a corresponding mutation in another adenosine deaminase (e.g., ecTadA).

[0580] In some embodiments, the adenosine deaminase comprises an A142X mutation in TadA reference sequence, or a corresponding mutation in another adenosine deaminase (e.g., ecTadA), where X indicates any amino acid other than the corresponding amino acid in the wild-type adenosine deaminase. In some embodiments, the adenosine deaminase comprises a A142N mutation in TadA reference sequence, or a corresponding mutation in another adenosine deaminase (e.g., ecTadA).

[0581] In some embodiments, the adenosine deaminase comprises an W23X mutation in TadA reference sequence, or a corresponding mutation in another adenosine deaminase (e.g., ecTadA), where X indicates any amino acid other than the corresponding amino acid in the wild-type adenosine deaminase. In some embodiments, the adenosine deaminase comprises a W23R, or W23L mutation in TadA reference sequence, or a corresponding mutation in another adenosine deaminase (e.g., ecTadA).

[0582] In some embodiments, the adenosine deaminase comprises an R152X mutation in TadA reference sequence, or a corresponding mutation in another adenosine deaminase (e.g., ecTadA), where X indicates any amino acid other than the corresponding amino acid in the wild-type adenosine deaminase. In some embodiments, the adenosine deaminase comprises a R152P, or R52H mutation in TadA reference sequence, or a corresponding mutation in another adenosine deaminase (e.g., ecTadA).

[0583] In one embodiment, the adenosine deaminase may comprise the mutations H36L, R51L, L84F, A106V, D108N, H123Y, S146C, D147Y, E155V, I156F, and K157N. In some embodiments, the adenosine deaminase comprises the following combination of mutations relative to TadA reference sequence, where each mutation of a combination is separated by a “_” and each combination of mutations is between parentheses:

### (A106V_D108N),

### (R107C_D108N),

### (H8Y_D108N_N127S_D147Y_Q154H),

### (H8Y_D108N_N127S_D147Y_E155V),

### (D108N_D147Y_E155V),

### (H8Y_D108N_N127S),

### (H8Y_D108N_N127S_D147Y_Q154H),

### (A106V_D108N_D147Y_E155V),

### (D108Q_D147Y_E155V),

### (D108M_D147Y_E155V),

### (D108L_D147Y_E155V),

### (D108K_D147Y_E155V),

### (D108I_D147Y_E155V),

### (D108F_D147Y_E155V),

### (A106V_D108N_D147Y),

### (A106V_D108M_D147Y_E155V),

### (E59A_A106V_D108N_D147Y_E155V),

[0584] (E59A cat dead_A106V_D108N_D147Y_E155V),

### (L84F_A106V_D108N H123Y D147Y E155V_I156Y),

### (L84F_A106V_D108N_H123Y_D147Y_E155V_I156F),

### (R26G_L84F_A106V_R107H_D108N_H123Y_A142N_A143D_D147Y_E155V_I156F),

### (E25G_R26G_L84F_A106V_R107H_D108N_H123Y_A142N_A143D_D147Y_E155V_I156F),

### (E25D_R26G_L84F_A106V_R107K_D108N_H123Y_A142N_A143G_D147Y_E155V_I156F),

### (R26Q_L84F_A106V_D108N_H123Y_A142N_D147Y_E155V_I156F),

### (E25M_R26G_L84F_A106V_R107P_D108N_H123Y_A142N_A143D_D147Y_E155V_I156F),

### (R26C_L84F_A106V_R107H_D108N_H123Y_A142N_D147Y_E155V_I156F),

### (L84F_A106V_D108N_H123Y_A142N_A143L_D147Y_E155V_I156F),

### (R26G_L84F_A106V_D108N_H123Y_A142N_D147Y_E155V_I156F),

### (E25A_R26G_L84F_A106V_R107N_D108N_H123Y_A142N_A143E_D147Y_E155V_I156F),

### (R26G_L84F_A106V_R107H_D108N_H123Y_A142N_A143D_D147Y_E155V_I156F),

### (A106V_D108N_A142N_D147Y_E155V),

### (R26G_A106V_D108N_A142N_D147Y_E155V),

### (E25D_R26G_A106V_R107K_D108N_A142N_A143G_D147Y_E155V),

### (R26G_A106V_D108N_R107H_A142N_A143D_D147Y_E155V),

### (E25D_R26G_A106V_D108N_A142N_D147Y_E155V),

### (A106V_R107K_D108N_A142N_D147Y_E155V),

### (A106V_D108N_A142N_A143G_D147Y_E155V),

### (A106V_D108N_A142N_A143L_D147Y_E155V),

### (H36L_R51L_L84F_A106V_D108N_H123Y_S146C_D147Y_E155V_I156F_K157N),

### (N37T_P48T_M70L_L84F_A106V_D108N_H123Y_D147Y_I49V_E155V_I156F),

### (N37S_L84F_A106V_D108N_H123Y_D147Y_E155V_I156F_K161T),

### (H36L_L84F_A106V_D108N_H123Y_D147Y_Q154H_E155V_I156F),

### (N72S_L84F_A106V_D108N_H123Y_S146R_D147Y_E155V_I156F),

### (H36L_P48L_L84F_A106V_D108N_H123Y_E134G_D147Y_E155V_I156F),

### (H36L_L84F_A106V_D108N_H123Y_D147Y_E155V_I156F_K157N),

### (H36L_L84F_A106V_D108N_H123Y_S146C_D147Y_E155V_I156F),

### (L84F_A106V_D108N_H123Y_S146R_D147Y_E155V_I156F_K161T),

### (N37S_R51H_D77G_L84F_A106V_D108N_H123Y_D147Y_E155V_I156F),

### (R51L_L84F_A106V_D108N_H123Y_D147Y_E155V_I156F_K157N),

### (D24G_Q71R_L84F_H96L_A106V_D108N_H123Y_D147Y_E155V_I156F_K160E),

### (H36L_G67V_L84F_A106V_D108N_H123Y_S146T_D147Y_E155V_I156F),

### (Q71L_L84F_A106V_D108N_H123Y_L137M_A143E_D147Y_E155V_I156F),

### (E25G_L84F_A106V_D108N_H123Y_D147Y_E155V_I156F_Q159L),

### (L84F_A91T_F104I_A106V_D108N_H123Y_D147Y_E155V_I156F),

### (N72D_L84F_A106V_D108N_H123Y_G125A_D147Y_E155V_I156F),

### (P48S_L84F_S97C_A106V_D108N_H123Y_D147Y_E155V_I156F),

### (W23G_L84F_A106V_D108N_H123Y_D147Y_E155V_I156F),

### (D24G_P48L_Q71R_L84F_A106V_D108N_H123Y_D147Y_E155V_I156F_Q159L),

### (L84F_A106V_D108N_H123Y_A142N_D147Y_E155V_I56F),

### (H36L_R51L_L84F_A106V_D108N_H123Y_A142N_S146C_D147Y_E155V_I156F_K157N), (N37S_L84F_A106V_D108N_H123Y_A142N_D147Y_E155V_I156F_K161T),

### (L84F_A106V_D108N_D147Y_E155V_I156F),

### (R51L_L84F_A106V_D108N_H123Y_S146C_D147Y_E155V_I156F_K157N_K161T),

### (L84F_A106V_D108N_H123Y_S146C_D147Y_E155V_I156F_K161T),

### (L84F_A106V_D108N_H123Y_S146C_D147Y_E155V_I156F_K157N_K160E_K161T),

### (L84F_A106V_D108N_H123Y_S146C_D147Y_E155V_I156F_K157N_K160E),

### (R74Q_L84F_A106V_D108N_H123Y_D147Y_E155V_I156F),

### (R74A_L84F_A106V_D108N_H123Y_D147Y_E155V_I156F),

### (L84F_A106V_D108N_H123Y_D147Y_E155V_I156F),

### (R74Q_L84F_A106V_D108N_H123Y_D147Y_E155V_I156F),

### (L84F_R98Q_A106V_D108N_H123Y_D147Y_E155V_I156F),

### (L84F_A106V_D108N_H123Y_R129Q_D147Y_E155V_I156F),

### (P48S_L84F_A106V_D108N_H123Y_A142N_D147Y_E155V_I156F),

### (P48S_A142N),

### (P48T_I49V_L84F_A106V_D108N_H123Y_A142N_D147Y_E155V_I56F_L157N),

### (P48T_I49V_A142N),

### (H36L_P48S_R51L_L84F_A106V_D108N_H123Y_S146C_D147Y_E155V_I156F_K157N),

### (H36L_P48 S_R51 L_L84F_A106V_D108N_H123 Y_S146C_A142N_D147Y_E155V_I156F

### (H36L_P48T_I49V_R51L_L84F_A106V_D108N_H123Y_S146C_D147Y_E155V_I156F_K157N),

### (H36L_P48T_I49V_R51L_L84F_A106V_D108N_H123Y_A142N_S146C_D147Y_E155V_I156F_K157N),

### (H36L_P48A_R51L_L84F_A106V_D108N_H123Y_S146C_D147Y_E155V_I156F_K157N

### (H36L_P48A_R51L_L84F_A106V_D108N_H123Y_A142N_S146C_D147Y_E155V_156F_K157N),

### (H36L_P48A_R51L_L84F_A106V_D108N_H123Y_S146C_A142N_D147Y_E155V_I156F_K157N),

### (W23L_H36L_P48A_R51L_L84F_A106V_D108N_H123Y_S146C_D147Y_E155V_I156F_K157N),

### (W23R_H36L_P48A_R51L_L84F_A106V_D108N_H123Y_S146C_D147Y_E155V_I156F_K157N),

### (W23L_H36L_P48A_R51L_L84F_A106V_D108N_H123Y_S146R_D147Y_E155V_I156F_K161T),

### (H36L_P48A_R51L_L84F_A106V_D108N_H123Y_S146C_D147Y_R152HE155V_I156F_K157N),

### (H36L_P48A_R51L_L84F_A106V_D108N_H123Y_S146C_D147Y_R152P_E155V_156F_K157N),

### (W23L_H36L_P48A_R51L_L84F_A106V_D108N_H123Y_S146C_D147Y_R152P_E155V_I156F_K157N),

### (W23L_H36L_P48A_R51L_L84F_A106V_D108N_H123Y_A142A_S146C_D147Y_E155V_I156F_K157N),

### (W23L_H36L_P48A_R51L_L84F_A106V_D108N_H123Y_A142A_S146C_D147Y_R152P_E155V_I156F_K157N),

### (W23L_H36L_P48A_R51L_L84F_A106V_D108N_H123Y_S146R_D147Y_E155V_I156F_K161T),

### (W23R_H36L_P48A_R51L_L84F_A106V_D108N_H123Y_S146C_D147Y_R152P_E155V_I156F_K157N),

### (H36L_P48A_R51L_L84F_A106V_D108N_H123Y_A142N_S146C_D147Y_R152P_E155V_I156F_K157N).

[0585] In certain embodiments, the fusion proteins provided herein comprise one or more features that improve the base editing activity of the fusion proteins. For example, any of the fusion proteins provided herein may comprise a Cas9 domain that has reduced nuclease activity. In some embodiments, any of the fusion proteins provided herein may have a Cas9 domain that does not have nuclease activity (dCas9), or a Cas9 domain that cuts one strand of a duplexed DNA molecule, referred to as a Cas9 nickase (nCas9).

[0586] In some embodiments, the adenosine deaminase is TadA*7.10. In some embodiments, TadA*7.10 comprises at least one alteration. In particular embodiments, TadA*7.10 comprises one or more of the following alterations: Y147T, Y147R, Q154S, Y123H, V82S, T166R, and Q154R. The alteration Y123H is also referred to herein as H123H (the alteration H123Y in TadA*7.10 reverted back to Y123H (wt)). In other embodiments, the TadA*7.10 comprises a combination of alterations selected from the group of: Y147T+Q154R; Y147T+Q154S; Y147R+Q154S; V82S+Q154S; V82S+Y147R; V82S+Q154R; V82S+Y123H; I76Y+V82S; V82S+Y123H+Y147T; V82S+Y123H+Y147R; V82S+Y123H+Q154R; Y147R+Q154R+Y123H; Y147R+Q154R+I76Y; Y147R+Q154R+T166R; Y123H+Y147R+Q154R+I76Y; V82S+Y123H+Y147R+Q154R; and 176Y+V82S+Y123H+Y147R+Q154R. In particular embodiments, an adenosine deaminase variant comprises a deletion of the C terminus beginning at residue 149, 150, 151, 152, 153, 154, 155, 156, and 157.

[0587] In some embodiments, a TadA variant comprises at least one alteration relative to TadA7.10. In some embodiments, a TadA variant comprises at least one alteration relative to a wild type TadA. Amino acid alterations in a TadA variant may be any one of the amino acid substitutions as described herein relative to TadA7.10 or wild type TadA. In some embodiments, a TadA variant, e.g. a TadA8, comprises an amino acid alteration at amino acid position 23, 26, 36, 37, 48, 49, 51, 72, 84, 87, 105, 108, 123, 125, 142, 145, 147, 152, 155, 16, 157, 161, or any combination thereof. In some embodiments, the TadA variant comprises amino acid alteration V82X relative to TadA7.10, wherein X is any amino acid other than V. In some embodiments, the TadA variant comprises a V82S alteration relative to TadA7.10. In some embodiments, amino acid X is an acidic amino acid, a basic amino acid, or a neutral amino acid. In some embodiments, a TadA variant comprises amino acid alteration T166X relative to TadA7.10, wherein X is any amino acid other than T. In some embodiments, amino acid X is an acidic amino acid, a basic amino acid, or a neutral amino acid. In some embodiments, a TadA variant comprises amino acid alteration V82X, Y147X, Q154X, I76X, Y123X, R23X, L36X, A48X, L51X, F84X, V106X, N108X, Y123X, C146X, Y147X, P152X, Q154X, V155X, F156X, N157X, T166X relative to TadA7.10, or any combination thereof, wherein X is any amino acid other than the amino acid in TadA7.10. In some embodiments, X is an acidic amino acid, a basic amino acid, or a neutral amino acid. In some embodiments, X reverts the amino acid to a wild type amino acid in the TadA reference sequence.

[0588] In other embodiments, a base editor of the invention is a monomer comprising an adenosine deaminase variant (e.g., TadA*8) comprising one or more of the following alterations: Y147T, Y147R, Q154S, Y123H, V82S, T166R, and/or Q154R. In other embodiments, the adenosine deaminase variant (TadA*8) is a monomer comprising a combination of alterations selected from the group of: Y147T+Q154R; Y147T+Q154S; Y147R+Q154S; V82S+Q154S; V82S+Y147R; V82S+Q154R; V82S+Y123H; I76Y+V82S; V82S+Y123H+Y147T; V82S+Y123H+Y147R; V82S+Y123H+Q154R; Y147R+Q154R+Y123H; Y147R+Q154R+176Y; Y147R+Q154R+T166R; Y123H+Y147R+Q154R+I76Y; V82S+Y123H+Y147R+Q154R; and I76Y+V82S+Y123H+Y147R+Q154R. In other embodiments, a base editor is a heterodimer comprising a wild-type adenosine deaminase and an adenosine deaminase variant (e.g., TadA*8) comprising one or more of the following alterations Y147T, Y147R, Q154S, Y123H, V82S, T166R, and/or Q154R. In other embodiments, the base editor is a heterodimer comprising a TadA*7.10 domain and an adenosine deaminase variant domain (e.g., TadA*8) comprising a combination of alterations selected from the group of: Y147T+Q154R; Y147T+Q154S; Y147R+Q154S; V82S+Q154S; V82S+Y147R; V82S+Q154R; V82S+Y123H; I76Y+V82S; V82S+Y123H+Y147T; V82S+Y123H+Y147R; V82S+Y123H+Q154R; Y147R+Q154R+Y123H; Y147R+Q154R+176Y; Y147R+Q154R+T166R; Y123H+Y147R+Q154R+I76Y; V82S+Y123H+Y147R+Q154R; and I76Y+V82S+Y123H+Y147R+Q154R.

[0589] In one embodiment, an adenosine deaminase is a TadA*8 that comprises or consists essentially of the following sequence or a fragment thereof having adenosine deaminase activity:

MSEVEFSHEYWMRHALTLAKRARDEREVPVGAVLVLNNRVIGEGWNRAI
GLHDPTAHAEIMALRQGGLVMQNYRLIDATLYVTFEPCVMCAGAMIHSR
IGRVVFGVRNAKTGAAGSLMDVLHYPGMNHRVEITEGILADECAALLCT
FFRMPRQVFNAQKKAQSSTD

[0590] In some embodiments, the TadA*8 is a truncated. In some embodiments, the truncated TadA*8 is missing 1, 2, 3, 4, 5, 6, 7, 8, 9, 10, 11, 12, 13, 14, 15, 6, 17, 18, 19, or 20 N-terminal amino acid residues relative to the full length TadA*8. In some embodiments, the truncated TadA*8 is missing 1, 2, 3, 4, 5, 6, 7, 8, 9, 10, 11, 12, 13, 14, 15, 6, 17, 18, 19, or 20 C-terminal amino acid residues relative to the full length TadA*8. In some embodiments the adenosine deaminase variant is a full-length TadA*8.

[0591] In some embodiments the TadA*8 is TadA*8.1, TadA*8.2, TadA*8.3, TadA*8.4, TadA*8.5, TadA*8.6, TadA*8.7, TadA*8.8, TadA*8.9, TadA*8.10, TadA*8.11, TadA*8.12, TadA*8.13, TadA*8.14, TadA*8.15, TadA*8.16, TadA*8.17, TadA*8.18, TadA*8.19, TadA*8.20, TadA*8.21, TadA*8.22, TadA*8.23, TadA*8.24.

[0592] In one embodiment, a fusion protein of the invention comprises a wild-type TadA is linked to an adenosine deaminase variant described herein (e.g., TadA*8), which is linked to Cas9 nickase. In particular embodiments, the fusion proteins comprise a single TadA*8 domain (e.g., provided as a monomer). In other embodiments, the base editor comprises TadA*8 and TadA(wt), which are capable of forming heterodimers. Exemplary sequences follow:

### TadA(wt):

MSEVEFSHEYWMRHALTLAKRAWDEREVPVGAVLVHNNRVIGEGWNRPI
GRHDPTAHAEIMALRQGGLVMQNYRLIDATLYVTLEPCVMCAGAMIHSR
IGRVVFGARDAKTGAAGSLMDVLHHPGMNHRVEITEGILADECAALLSD
FFRMRRQEIKAQKKAQSSTD

### TadA*7.10:

MSEVEFSHEYWMRHALTLAKRARDEREVPVGAVLVLNNRVIGEGWNRAI
GLHDPTAHAEIMALRQGGLVMQNYRLIDATLYVTFEPCVMCAGAMIHSR
IGRVVFGVRNAKTGAAGSLMDVLHYPGMNHRVEITEGILADECAALLCY
FFRMPRQVFNAQKKAQSSTD

### TadA*8:

MSEVEFSHEYWMRHALTLAKRARDEREVPVGAVLVLNNRVIGEGWNRAI
GLHDPTAHAEIMALRQGGLVMQNYRLIDATLYVTFEPCVMCAGAMIHSR
IGRVVFGVRNAKTGAAGSLMDVLHYPGMNHRVEITEGILADECAALLCT
FFRMPRQVFNAQKKAQSSTD.

[0596] In some embodiments, the adenosine deaminase comprises an amino acid sequence that is at least 60%, at least 65%, at least 70%, at least 75%, at least 80%, at least 85%, at least 90%, at least 95%, at least 96%, at least 97%, at least 98%, at least 99%, or at least 99.5% identical to any one of the amino acid sequences set forth in any of the adenosine deaminases provided herein. It should be appreciated that adenosine deaminases provided herein may include one or more mutations (e.g., any of the mutations provided herein). The disclosure provides any deaminase domains with a certain percent identity plus any of the mutations or combinations thereof described herein. In some embodiments, the adenosine deaminase comprises an amino acid sequence that has 1, 2, 3, 4, 5, 6, 7, 8, 9, 10, 11, 12, 13, 14, 15, 16, 17, 18, 19, 20, 21, 22, 21, 24, 25, 26, 27, 28, 29, 30, 31, 32, 33, 34, 35, 36, 37, 38, 39, 40, 41, 42, 43, 44, 45, 46, 47, 48, 49, 50, or more mutations compared to a reference sequence, or any of the adenosine deaminases provided herein. In some embodiments, the adenosine deaminase comprises an amino acid sequence that has at least 5, at least 10, at least 15, at least 20, at least 25, at least 30, at least 35, at least 40, at least 45, at least 50, at least 60, at least 70, at least 80, at least 90, at least 100, at least 110, at least 120, at least 130, at least 140, at least 150, at least 160, or at least 170 identical contiguous amino acid residues as compared to any one of the amino acid sequences known in the art or described herein.

[0597] In particular embodiments, a TadA*8 comprises one or more mutations at any of the following positions shown in bold. In other embodiments, a TadA*8 comprises one or more mutations at any of the positions shown with underlining:

| | |
|---|---|
| MSEVEFSHEY WMRHALTLAK RARDEREVPV GAVLVLNNRV IGEGWNRAIG | 50 |
| LHDPTAHAEI MALRQGGLVM QNYRLIDATL YVTFEPCVMC AGAMIHSRIG | 100 |
| RVVFGVRNAK TGAAGSLMDV LHYPGMNHRV EITEGILADE CAALLCYFFR | 150 |
| MPRQVFNAQK KAQSSTD | |

[0598] For example, the TadA*8 comprises alterations at amino acid position 82 and/or 166 (e.g., V82S, T166R) alone or in combination with any one or more of the following Y147T, Y147R, Q154S, Y123H, and/or Q154R. In particular embodiments, a combination of alterations is selected from the group consisting of: Y147T+Q154R; Y147T+Q154S; Y147R+Q154S; V82S+Q154S; V82S+Y147R; V82S+Q154R; V82S+Y123H; I76Y+V82S; V82S+Y123H+Y147T; V82S+Y123H+Y147R; V82S+Y123H+Q154R; Y147R+Q154R+Y123H; Y147R+Q154R+176Y; Y147R+Q154R+T166R; Y123H+Y147R+Q154R+I76Y; V82S+Y123H+Y147R+Q154R; and I76Y+V82S+Y123H+Y147R+Q154R.

[0599] In some embodiments, the adenosine deaminase is TadA*8, which comprises or consists essentially of the following sequence or a fragment thereof having adenosine deaminase activity:

MSEVEFSHEY WMRHALTLAK RARDEREVPV GAVLVLNNRV
IGEGWNRAIG LHDPTAHAEI MALRQGGLVM QNYRLIDATL
YVTFEPCVMC AGAMIHSRIG RVVFGVRNAK TGAAGSLMDV
LHYPGMNHRV EITEGILADE CAALLCTFFR MPRQVFNAQK
KAQSSTD

[0600] In some embodiments, the TadA*8 is truncated. In some embodiments, the truncated TadA*8 is missing 1, 2, 3, 4, 5, 6, 7, 8, 9, 10, 11, 12, 13, 14, 15, 6, 17, 18, 19, or 20 N-terminal amino acid residues relative to the full length TadA*8. In some embodiments, the truncated TadA*8 is missing 1, 2, 3, 4, 5, 6, 7, 8, 9, 10, 11, 12, 13, 14, 15, 6, 17, 18, 19, or 20 C-terminal amino acid residues relative to the full length TadA*8. In some embodiments the adenosine deaminase variant is a full-length TadA*8.

[0601] In one embodiment, a fusion protein of the invention comprises a wild-type TadA is linked to an adenosine deaminase variant described herein (e.g., TadA*8), which is linked to Cas9 nickase. In particular embodiments, the fusion proteins comprise a single TadA*8 domain (e.g., provided as a monomer). In other embodiments, the base editor comprises TadA*8 and TadA(wt), which are capable of forming heterodimers.

[0602] In some embodiments, a synthetic library of adenosine deaminases alleles, e.g., TadA alleles can be utilized to generate an adenosine base editor with modified base editing efficiency and/or specificity. In some embodiments, an adenosine base editor generated from a synthetic library comprises higher base editing efficiency and/or specificity. In some embodiments, an adenosine base editor generated from a synthetic library exhibits increased base editing efficiency, increased base editing specificity, reduced off-target editing, reduced bystander editing, reduced indel formation, and/or reduced spuriours editing compared to an adenosine base editor with a wild type TadA. In some embodiments, an adenosine base editor generated from a synthetic library exhibits increased base editing efficiency, increased base editing specificity, reduced off-target editing, reduced bystander editing, reduced indel formation, and/or reduced spuriours editing compared to an adenosine base editor with a TadA*7.10. In some embodiments, the synthetic library comprises randomized TadA portion of ABE. In some embodiments, the synthetic library comprises all 20 canonical amino acid substitutions at each position of TadA. In some embodiments, the synthetic library comprises an average frequency of 1-2 nucleotide substitution mutations per library member. In some embodiments, the synthetic library comprises background mutations found in TadA*7.10.

[0603] In some embodiments, the base editing system described herein comprises an ABE with TadA inserted into a Cas9. Sequences of relevant ABEs with TadA inserted into a Cas9 are provided.

101 Cas9 TadAins 1015
MDKKYSIGLAIGTNSVGWAVITDEYKVPSKKFKVLGNTDRHSIKKNLIGA
LLFDSGETAEATRLKRTARRRYTRRKNRICYLQEIFSNEMAKVDDSFFHR
LEESFLVEEDKKHERHPIFGNIVDEVAYHEKYPTIYHLRKKLVDSTDKAD
LRLIYLALAHMIKFRGHFLIEGDLNPDNSDVDKLFIQLVQTYNQLFEENP
INASGVDAKAILSARLSKSRRLENLIAQLPGEKKNGLFGNLIALSLGLTP
NFKSNFDLAEDAKLQLSKDTYDDDLDNLLAQIGDQYADLFLAAKNLSDAI
LLSDILRVNTEITKAPLSASMIKRYDEHHQDLTLLKALVRQQLPEKYKEI
FFDQSKNGYAGYIDGGASQEEFYKFIKPILEKMDGTEELLVKLNREDLLR
KQRTFDNGSIPHQIHLGELHAILRRQEDFYPFLKDNREKIEKILTFRIPY
YVGPLARGNSRFAWMTRKSEETITPWNFEEVVDKGASAQSFIERMTNFDK
NLPNEKVLPKHSLLYEYFTVYNELTKVKYVTEGMRKPAFLSGEQKKAIVD
LLFKTNRKVTVKQLKEDYFKKIECFDSVEISGVEDRFNASLGTYHDLLKI
IKDKDFLDNEENEDILEDIVLTLTLFEDREMIEERLKTYAHLFDDKVMKQ
LKRRRYTGWGRLSRKLINGIRDKQSGKTILDFLKSDGFANRNFMQLIHDD
SLTFKEDIQKAQVSGQGDSLHEHIANLAGSPAIKKGILQTVKVVDELVKV
MGRHKPENIVIEMARENQTTQKGQKNSRERMKRIEEGIKELGSQILKEHP
VENTQLQNEKLYLYYLQNGRDMYVDQELDINRLSDYDVDHIVPQSFLKDD
SIDNKVLTRSDKNRGKSDNVPSEEVVKKMKNYWRQLLNAKLITQRKFDNL
TKAERGGLSELDKAGFIKRQLVETRQITKHVAQILDSRMNTKYDENDKLI
REVKVITLKSKLVSDFRKDFQFYKVREINNYHHAHDAYLNAVVGTALIKK
YPKLESEFVYGDYKVGSSGSETPGTSESATPESSGSEVEFSHEYWMRHAL
TLAKRARDEREVPVGAVLVLNNRVIGEGWNRAIGLHDPTAHAEIMALRQG
GLVMQNYRLIDATLYVTFEPCVMCAGAMIHSRIGRVVFGVRNAKTGAAGS
LMDVLHYPGMNHRVEITEGILADECAALLCYFFRMPRQVFNAQKKAQSST
DYDVRKMIAKSEQEIGKATAKYFFYSNIMNFFKTEITLANGEIRKRPLIE
TNGETGEIVWDKGRDFATVRKVLSMPQVNIVKKTEVQTGGFSKESILPKR
NSDKLIARKKDWDPKKYGGFDSPTVAYSVLVVAKVEKGKSKKLKSVKELL
GITIMERSSFEKNPIDFLEAKGYKEVKKDLIIKLPKYSLFELENGRKRML
ASAGELQKGNELALPSKYVNFLYLASHYEKLKGSPEDNEQKQLFVEQHKH
YLDEIIEQISEFSKRVILADANLDKVLSAYNKHRDKPIREQAENIIHLFT
LTNLGAPAAFKYFDTTIDRKRYTSTKEVLDATLIHQSITGLYETRIDLSQ
LGGD
102 Cas9 TadAins 1022
MDKKYSIGLAIGTNSVGWAVITDEYKVPSKKFKVLGNTDRHSIKKNLIGA
LLFDSGETAEATRLKRTARRRYTRRKNRICYLQEIFSNEMAKVDDSFFHR
LEESFLVEEDKKHERHPIFGNIVDEVAYHEKYPTIYHLRKKLVDSTDKAD
LRLIYLALAHMIKFRGHFLIEGDLNPDNSDVDKLFIQLVQTYNQLFEENP
INASGVDAKAILSARLSKSRRLENLIAQLPGEKKNGLFGNLIALSLGLTP
NFKSNFDLAEDAKLQLSKDTYDDDLDNLLAQIGDQYADLFLAAKNLSDAI
LLSDILRVNTEITKAPLSASMIKRYDEHHQDLTLLKALVRQQLPEKYKEI
FFDQSKNGYAGYIDGGASQEEFYKFIKPILEKMDGTEELLVKLNREDLLR
KQRTFDNGSIPHQIHLGELHAILRRQEDFYPFLKDNREKIEKILTFRIPY
YVGPLARGNSRFAWMTRKSEETITPWNFEEVVDKGASAQSFIERMTNFDK
NLPNEKVLPKHSLLYEYFTVYNELTKVKYVTEGMRKPAFLSGEQKKAIVD
LLFKTNRKVTVKQLKEDYFKKIECFDSVEISGVEDRFNASLGTYHDLLKI
IKDKDFLDNEENEDILEDIVLTLTLFEDREMIEERLKTYAHLFDDKVMKQ
LKRRRYTGWGRLSRKLINGIRDKQSGKTILDFLKSDGFANRNFMQLIHDD
SLTFKEDIQKAQVSGQGDSLHEHIANLAGSPAIKKGILQTVKVVDELVKV
MGRHKPENIVIEMARENQTTQKGQKNSRERMKRIEEGIKELGSQILKEHP
VENTQLQNEKLYLYYLQNGRDMYVDQELDINRLSDYDVDHIVPQSFLKDD
SIDNKVLTRSDKNRGKSDNVPSEEVVKKMKNYWRQLLNAKLITQRKFDNL
TKAERGGLSELDKAGFIKRQLVETRQITKHVAQILDSRMNTKYDENDKLI
REVKVITLKSKLVSDFRKDFQFYKVREINNYHHAHDAYLNAVVGTALIKK
YPKLESEFVYGDYKVYDVRKMIGSSGSETPGTSESATPESSGSEVEFSHE
YWMRHALTLAKRARDEREVPVGAVLVLNNRVIGEGWNRAIGLHDPTAHAE
IMALRQGGLVMQNYRLIDATLYVTFEPCVMCAGAMIHSRIGRVVFGVRNA
KTGAAGSLMDVLHYPGMNHRVEITEGILADECAALLCYFFRMPRQVFNAQ
KKAQSSTDAKSEQEIGKATAKYFFYSNIMNFFKTEITLANGEIRKRPLIE
TNGETGEIVWDKGRDFATVRKVLSMPQVNIVKKTEVQTGGFSKESILPKR
NSDKLIARKKDWDPKKYGGFDSPTVAYSVLVVAKVEKGKSKKLKSVKELL
GITIMERSSFEKNPIDFLEAKGYKEVKKDLIIKLPKYSLFELENGRKRML
ASAGELQKGNELALPSKYVNFLYLASHYEKLKGSPEDNEQKQLFVEQHKH
YLDEIIEQISEFSKRVILADANLDKVLSAYNKHRDKPIREQAENIIHLFT
LTNLGAPAAFKYFDTTIDRKRYTSTKEVLDATLIHQSITGLYETRIDLSQ
LGGD
103 Cas9 TadAins 1029
MDKKYSIGLAIGTNSVGWAVITDEYKVPSKKFKVLGNTDRHSIKKNLIGA
LLFDSGETAEATRLKRTARRRYTRRKNRICYLQEIFSNEMAKVDDSFFHR
LEESFLVEEDKKHERHPIFGNIVDEVAYHEKYPTIYHLRKKLVDSTDKAD
LRLIYLALAHMIKFRGHFLIEGDLNPDNSDVDKLFIQLVQTYNQLFEENP
INASGVDAKAILSARLSKSRRLENLIAQLPGEKKNGLFGNLIALSLGLTP
NFKSNFDLAEDAKLQLSKDTYDDDLDNLLAQIGDQYADLFLAAKNLSDAI
LLSDILRVNTEITKAPLSASMIKRYDEHHQDLTLLKALVRQQLPEKYKEI
FFDQSKNGYAGYIDGGASQEEFYKFIKPILEKMDGTEELLVKLNREDLLR
KQRTFDNGSIPHQIHLGELHAILRRQEDFYPFLKDNREKIEKILTFRIPY
YVGPLARGNSRFAWMTRKSEETITPWNFEEVVDKGASAQSFIERMTNFDK
NLPNEKVLPKHSLLYEYFTVYNELTKVKYVTEGMRKPAFLSGEQKKAIVD
LLFKTNRKVTVKQLKEDYFKKIECFDSVEISGVEDRFNASLGTYHDLLKI
IKDKDFLDNEENEDILEDIVLTLTLFEDREMIEERLKTYAHLFDDKVMKQ
LKRRRYTGWGRLSRKLINGIRDKQSGKTILDFLKSDGFANRNFMQLIHDD
SLTFKEDIQKAQVSGQGDSLHEHIANLAGSPAIKKGILQTVKVVDELVKV
MGRHKPENIVIEMARENQTTQKGQKNSRERMKRIEEGIKELGSQILKEHP
VENTQLQNEKLYLYYLQNGRDMYVDQELDINRLSDYDVDHIVPQSFLKDD
SIDNKVLTRSDKNRGKSDNVPSEEVVKKMKNYWRQLLNAKLITQRKFDNL
TKAERGGLSELDKAGFIKRQLVETRQITKHVAQILDSRMNTKYDENDKLI
REVKVITLKSKLVSDFRKDFQFYKVREINNYHHAHDAYLNAVVGTALIKK
YPKLESEFVYGDYKVYDVRKMIAKSEQEIGSSGSETPGTSESATPESSGS
EVEFSHEYWMRHALTLAKRARDEREVPVGAVLVLNNRVIGEGWNRAIGLH
DPTAHAEIMALRQGGLVMQNYRLIDATLYVTFEPCVMCAGAMIHSRIGRV
VFGVRNAKTGAAGSLMDVLHYPGMNHRVEITEGILADECAALLCYFFRMP
RQVFNAQKKAQSSTDGKATAKYFFYSNIMNFFKTEITLANGEIRKRPLIE
TNGETGEIVWDKGRDFATVRKVLSMPQVNIVKKTEVQTGGFSKESILPKR
NSDKLIARKKDWDPKKYGGFDSPTVAYSVLVVAKVEKGKSKKLKSVKELL
GITIMERSSFEKNPIDFLEAKGYKEVKKDLIIKLPKYSLFELENGRKRML
ASAGELQKGNELALPSKYVNFLYLASHYEKLKGSPEDNEQKQLFVEQHKH
YLDEIIEQISEFSKRVILADANLDKVLSAYNKHRDKPIREQAENIIHLFT
LTNLGAPAAFKYFDTTIDRKRYTSTKEVLDATLIHQSITGLYETRIDLSQ
LGGD
103 Cas9 TadAins 1040
MDKKYSIGLAIGTNSVGWAVITDEYKVPSKKFKVLGNTDRHSIKKNLIGA
LLFDSGETAEATRLKRTARRRYTRRKNRICYLQEIFSNEMAKVDDSFFHR
LEESFLVEEDKKHERHPIFGNIVDEVAYHEKYPTIYHLRKKLVDSTDKAD
LRLIYLALAHMIKFRGHFLIEGDLNPDNSDVDKLFIQLVQTYNQLFEENP
INASGVDAKAILSARLSKSRRLENLIAQLPGEKKNGLFGNLIALSLGLTP
NFKSNFDLAEDAKLQLSKDTYDDDLDNLLAQIGDQYADLFLAAKNLSDAI
LLSDILRVNTEITKAPLSASMIKRYDEHHQDLTLLKALVRQQLPEKYKEI
FFDQSKNGYAGYIDGGASQEEFYKFIKPILEKMDGTEELLVKLNREDLLR
KQRTFDNGSIPHQIHLGELHAILRRQEDFYPFLKDNREKIEKILTFRIPY
YVGPLARGNSRFAWMTRKSEETITPWNFEEVVDKGASAQSFIERMTNFDK
NLPNEKVLPKHSLLYEYFTVYNELTKVKYVTEGMRKPAFLSGEQKKAIVD
LLFKTNRKVTVKQLKEDYFKKIECFDSVEISGVEDRFNASLGTYHDLLKI
IKDKDFLDNEENEDILEDIVLTLTLFEDREMIEERLKTYAHLFDDKVMKQ
LKRRRYTGWGRLSRKLINGIRDKQSGKTILDFLKSDGFANRNFMQLIHDD
SLTFKEDIQKAQVSGQGDSLHEHIANLAGSPAIKKGILQTVKVVDELVKV
MGRHKPENIVIEMARENQTTQKGQKNSRERMKRIEEGIKELGSQILKEHP
VENTQLQNEKLYLYYLQNGRDMYVDQELDINRLSDYDVDHIVPQSFLKDD
SIDNKVLTRSDKNRGKSDNVPSEEVVKKMKNYWRQLLNAKLITQRKFDNL
TKAERGGLSELDKAGFIKRQLVETRQITKHVAQILDSRMNTKYDENDKLI
REVKVITLKSKLVSDFRKDFQFYKVREINNYHHAHDAYLNAVVGTALIKK
YPKLESEFVYGDYKVYDVRKMIAKSEQEIGKATAKYFFYSGSSGSETPGT
SESATPESSGSEVEFSHEYWMRHALTLAKRARDEREVPVGAVLVLNNRVI
GEGWNRAIGLHDPTAHAEIMALRQGGLVMQNYRLIDATLYVTFEPCVMCA
GAMIHSRIGRVVFGVRNAKTGAAGSLMDVLHYPGMNHRVEITEGILADEC
AALLCYFFRMPRQVFNAQKKAQSSTDNIMNFFKTEITLANGEIRKRPLIE
TNGETGEIVWDKGRDFATVRKVLSMPQVNIVKKTEVQTGGFSKESILPKR
NSDKLIARKKDWDPKKYGGFDSPTVAYSVLVVAKVEKGKSKKLKSVKELL
GITIMERSSFEKNPIDFLEAKGYKEVKKDLIIKLPKYSLFELENGRKRML
ASAGELQKGNELALPSKYVNFLYLASHYEKLKGSPEDNEQKQLFVEQHKH
YLDEIIEQISEFSKRVILADANLDKVLSAYNKHRDKPIREQAENIIHLFT
LTNLGAPAAFKYFDTTIDRKRYTSTKEVLDATLIHQSITGLYETRIDLSQ
LGGD
105 Cas9 TadAins 1068
MDKKYSIGLAIGTNSVGWAVITDEYKVPSKKFKVLGNTDRHSIKKNLIGA
LLFDSGETAEATRLKRTARRRYTRRKNRICYLQEIFSNEMAKVDDSFFHR
LEESFLVEEDKKHERHPIFGNIVDEVAYHEKYPTIYHLRKKLVDSTDKAD
LRLIYLALAHMIKFRGHFLIEGDLNPDNSDVDKLFIQLVQTYNQLFEENP
INASGVDAKAILSARLSKSRRLENLIAQLPGEKKNGLFGNLIALSLGLTP
NFKSNFDLAEDAKLQLSKDTYDDDLDNLLAQIGDQYADLFLAAKNLSDAI
LLSDILRVNTEITKAPLSASMIKRYDEHHQDLTLLKALVRQQLPEKYKEI
FFDQSKNGYAGYIDGGASQEEFYKFIKPILEKMDGTEELLVKLNREDLLR
KQRTFDNGSIPHQIHLGELHAILRRQEDFYPFLKDNREKIEKILTFRIPY
YVGPLARGNSRFAWMTRKSEETITPWNFEEVVDKGASAQSFIERMTNFDK
NLPNEKVLPKHSLLYEYFTVYNELTKVKYVTEGMRKPAFLSGEQKKAIVD
LLFKTNRKVTVKQLKEDYFKKIECFDSVEISGVEDRFNASLGTYHDLLKI
IKDKDFLDNEENEDILEDIVLTLTLFEDREMIEERLKTYAHLFDDKVMKQ
LKRRRYTGWGRLSRKLINGIRDKQSGKTILDFLKSDGFANRNFMQLIHDD
SLTFKEDIQKAQVSGQGDSLHEHIANLAGSPAIKKGILQTVKVVDELVKV
MGRHKPENIVIEMARENQTTQKGQKNSRERMKRIEEGIKELGSQILKEHP
VENTQLQNEKLYLYYLQNGRDMYVDQELDINRLSDYDVDHIVPQSFLKDD
SIDNKVLTRSDKNRGKSDNVPSEEVVKKMKNYWRQLLNAKLITQRKFDNL
TKAERGGLSELDKAGFIKRQLVETRQITKHVAQILDSRMNTKYDENDKLI
REVKVITLKSKLVSDFRKDFQFYKVREINNYHHAHDAYLNAVVGTALIKK
YPKLESEFVYGDYKVYDVRKMIAKSEQEIGKATAKYFFYSNIMNFFKTEI
TLANGEIRKRPLIETNGEGSSGSETPGTSESATPESSGSEVEFSHEYWMR
HALTLAKRARDEREVPVGAVLVLNNRVIGEGWNRAIGLHDPTAHAEIMAL
RQGGLVMQNYRLIDATLYVTFEPCVMCAGAMIHSRIGRVVFGVRNAKTGA
AGSLMDVLHYPGMNHRVEITEGILADECAALLCYFFRMPRQVFNAQKKAQ
SSTDTGEIVWDKGRDFATVRKVLSMPQVNIVKKTEVQTGGFSKESILPKR
NSDKLIARKKDWDPKKYGGFDSPTVAYSVLVVAKVEKGKSKKLKSVKELL
GITIMERSSFEKNPIDFLEAKGYKEVKKDLIIKLPKYSLFELENGRKRML
ASAGELQKGNELALPSKYVNFLYLASHYEKLKGSPEDNEQKQLFVEQHKH
YLDEIIEQISEFSKRVILADANLDKVLSAYNKHRDKPIREQAENIIHLFT
LTNLGAPAAFKYFDTTIDRKRYTSTKEVLDATLIHQSITGLYETRIDLSQ
LGGD
106 Cas9 TadAins 1247
MDKKYSIGLAIGTNSVGWAVITDEYKVPSKKFKVLGNTDRHSIKKNLIGA
LLFDSGETAEATRLKRTARRRYTRRKNRICYLQEIFSNEMAKVDDSFFHR
LEESFLVEEDKKHERHPIFGNIVDEVAYHEKYPTIYHLRKKLVDSTDKAD
LRLIYLALAHMIKFRGHFLIEGDLNPDNSDVDKLFIQLVQTYNQLFEENP
INASGVDAKAILSARLSKSRRLENLIAQLPGEKKNGLFGNLIALSLGLTP
NFKSNFDLAEDAKLQLSKDTYDDDLDNLLAQIGDQYADLFLAAKNLSDAI
LLSDILRVNTEITKAPLSASMIKRYDEHHQDLTLLKALVRQQLPEKYKEI
FFDQSKNGYAGYIDGGASQEEFYKFIKPILEKMDGTEELLVKLNREDLLR
KQRTFDNGSIPHQIHLGELHAILRRQEDFYPFLKDNREKIEKILTFRIPY
YVGPLARGNSRFAWMTRKSEETITPWNFEEVVDKGASAQSFIERMTNFDK
NLPNEKVLPKHSLLYEYFTVYNELTKVKYVTEGMRKPAFLSGEQKKAIVD
LLFKTNRKVTVKQLKEDYFKKIECFDSVEISGVEDRFNASLGTYHDLLKI
IKDKDFLDNEENEDILEDIVLTLTLFEDREMIEERLKTYAHLFDDKVMKQ
LKRRRYTGWGRLSRKLINGIRDKQSGKTILDFLKSDGFANRNFMQLIHDD
SLTFKEDIQKAQVSGQGDSLHEHIANLAGSPAIKKGILQTVKVVDELVKV
MGRHKPENIVIEMARENQTTQKGQKNSRERMKRIEEGIKELGSQILKEHP
VENTQLQNEKLYLYYLQNGRDMYVDQELDINRLSDYDVDHIVPQSFLKDD
SIDNKVLTRSDKNRGKSDNVPSEEVVKKMKNYWRQLLNAKLITQRKFDNL
TKAERGGLSELDKAGFIKRQLVETRQITKHVAQILDSRMNTKYDENDKLI
REVKVITLKSKLVSDFRKDFQFYKVREINNYHHAHDAYLNAVVGTALIKK
YPKLESEFVYGDYKVYDVRKMIAKSEQEIGKATAKYFFYSNIMNFFKTEI
TLANGEIRKRPLIETNGETGEIVWDKGRDFATVRKVLSMPQVNIVKKTEV
QTGGFSKESILPKRNSDKLIARKKDWDPKKYGGFDSPTVAYSVLVVAKVE
KGKSKKLKSVKELLGITIMERSSFEKNPIDFLEAKGYKEVKKDLIIKLPK
YSLFELENGRKRMLASAGELQKGNELALPSKYVNFLYLASHYEKLKGGSS
GSETPGTSESATPESSGSEVEFSHEYWMRHALTLAKRARDEREVPVGAVL
VLNNRVIGEGWNRAIGLHDPTAHAEIMALRQGGLVMQNYRLIDATLYVTF
EPCVMCAGAMIHSRIGRVVFGVRNAKTGAAGSLMDVLHYPGMNHRVEITE
GILADECAALLCYFFRMPRQVFNAQKKAQSSTDSPEDNEQKQLFVEQHKH
YLDEIIEQISEFSKRVILADANLDKVLSAYNKHRDKPIREQAENIIHLFT
LTNLGAPAAFKYFDTTIDRKRYTSTKEVLDATLIHQSITGLYETRIDLSQ
LGGD
107 Cas9 TadAins 1054
MDKKYSIGLAIGTNSVGWAVITDEYKVPSKKFKVLGNTDRHSIKKNLIGA
LLFDSGETAEATRLKRTARRRYTRRKNRICYLQEIFSNEMAKVDDSFFHR
LEESFLVEEDKKHERHPIFGNIVDEVAYHEKYPTIYHLRKKLVDSTDKAD
LRLIYLALAHMIKFRGHFLIEGDLNPDNSDVDKLFIQLVQTYNQLFEENP
INASGVDAKAILSARLSKSRRLENLIAQLPGEKKNGLFGNLIALSLGLTP
NFKSNFDLAEDAKLQLSKDTYDDDLDNLLAQIGDQYADLFLAAKNLSDAI
LLSDILRVNTEITKAPLSASMIKRYDEHHQDLTLLKALVRQQLPEKYKEI
FFDQSKNGYAGYIDGGASQEEFYKFIKPILEKMDGTEELLVKLNREDLLR
KQRTFDNGSIPHQIHLGELHAILRRQEDFYPFLKDNREKIEKILTFRIPY
YVGPLARGNSRFAWMTRKSEETITPWNFEEVVDKGASAQSFIERMTNFDK
NLPNEKVLPKHSLLYEYFTVYNELTKVKYVTEGMRKPAFLSGEQKKAIVD
LLFKTNRKVTVKQLKEDYFKKIECFDSVEISGVEDRFNASLGTYHDLLKI
IKDKDFLDNEENEDILEDIVLTLTLFEDREMIEERLKTYAHLFDDKVMKQ
LKRRRYTGWGRLSRKLINGIRDKQSGKTILDFLKSDGFANRNFMQLIHDD
SLTFKEDIQKAQVSGQGDSLHEHIANLAGSPAIKKGILQTVKVVDELVKV
MGRHKPENIVIEMARENQTTQKGQKNSRERMKRIEEGIKELGSQILKEHP
VENTQLQNEKLYLYYLQNGRDMYVDQELDINRLSDYDVDHIVPQSFLKDD
SIDNKVLTRSDKNRGKSDNVPSEEVVKKMKNYWRQLLNAKLITQRKFDNL
TKAERGGLSELDKAGFIKRQLVETRQITKHVAQILDSRMNTKYDENDKLI
REVKVITLKSKLVSDFRKDFQFYKVREINNYHHAHDAYLNAVVGTALIKK
YPKLESEFVYGDYKVYDVRKMIAKSEQEIGKATAKYFFYSNIMNFFKTEI
TLANGSSGSETPGTSESATPESSGSEVEFSHEYWMRHALTLAKRARDERE
VPVGAVLVLNNRVIGEGWNRAIGLHDPTAHAEIMALRQGGLVMQNYRLID
ATLYVTFEPCVMCAGAMIHSRIGRVVFGVRNAKTGAAGSLMDVLHYPGMN
HRVEITEGILADECAALLCYFFRMPRQVFNAQKKAQSSTDGEIRKRPLIE
TNGETGEIVWDKGRDFATVRKVLSMPQVNIVKKTEVQTGGFSKESILPKR
NSDKLIARKKDWDPKKYGGFDSPTVAYSVLVVAKVEKGKSKKLKSVKELL
GITIMERSSFEKNPIDFLEAKGYKEVKKDLIIKLPKYSLFELENGRKRML
ASAGELQKGNELALPSKYVNFLYLASHYEKLKGSPEDNEQKQLFVEQHKH
YLDEIIEQISEFSKRVILADANLDKVLSAYNKHRDKPIREQAENIIHLFT
LTNLGAPAAFKYFDTTIDRKRYTSTKEVLDATLIHQSITGLYETRIDLSQ
LGGD
108 Cas9 TadAins 1026
MDKKYSIGLAIGTNSVGWAVITDEYKVPSKKFKVLGNTDRHSIKKNLIGA
LLFDSGETAEATRLKRTARRRYTRRKNRICYLQEIFSNEMAKVDDSFFHR
LEESFLVEEDKKHERHPIFGNIVDEVAYHEKYPTIYHLRKKLVDSTDKAD
LRLIYLALAHMIKFRGHFLIEGDLNPDNSDVDKLFIQLVQTYNQLFEENP
INASGVDAKAILSARLSKSRRLENLIAQLPGEKKNGLFGNLIALSLGLTP
NFKSNFDLAEDAKLQLSKDTYDDDLDNLLAQIGDQYADLFLAAKNLSDAI
LLSDILRVNTEITKAPLSASMIKRYDEHHQDLTLLKALVRQQLPEKYKEI
FFDQSKNGYAGYIDGGASQEEFYKFIKPILEKMDGTEELLVKLNREDLLR
KQRTFDNGSIPHQIHLGELHAILRRQEDFYPFLKDNREKIEKILTFRIPY
YVGPLARGNSRFAWMTRKSEETITPWNFEEVVDKGASAQSFIERMTNFDK
NLPNEKVLPKHSLLYEYFTVYNELTKVKYVTEGMRKPAFLSGEQKKAIVD
LLFKTNRKVTVKQLKEDYFKKIECFDSVEISGVEDRFNASLGTYHDLLKI
IKDKDFLDNEENEDILEDIVLTLTLFEDREMIEERLKTYAHLFDDKVMKQ
LKRRRYTGWGRLSRKLINGIRDKQSGKTILDFLKSDGFANRNFMQLIHDD
SLTFKEDIQKAQVSGQGDSLHEHIANLAGSPAIKKGILQTVKVVDELVKV
MGRHKPENIVIEMARENQTTQKGQKNSRERMKRIEEGIKELGSQILKEHP
VENTQLQNEKLYLYYLQNGRDMYVDQELDINRLSDYDVDHIVPQSFLKDD
SIDNKVLTRSDKNRGKSDNVPSEEVVKKMKNYWRQLLNAKLITQRKFDNL
TKAERGGLSELDKAGFIKRQLVETRQITKHVAQILDSRMNTKYDENDKLI
REVKVITLKSKLVSDFRKDFQFYKVREINNYHHAHDAYLNAVVGTALIKK
YPKLESEFVYGDYKVYDVRKMIAKSEGSSGSETPGTSESATPESSGSEVE
FSHEYWMRHALTLAKRARDEREVPVGAVLVLNNRVIGEGWNRAIGLHDPT
AHAEIMALRQGGLVMQNYRLIDATLYVTFEPCVMCAGAMIHSRIGRVVFG
VRNAKTGAAGSLMDVLHYPGMNHRVEITEGILADECAALLCYFFRMPRQV
FNAQKKAQSSTDQEIGKATAKYFFYSNIMNFFKTEITLANGEIRKRPLIE
TNGETGEIVWDKGRDFATVRKVLSMPQVNIVKKTEVQTGGFSKESILPKR
NSDKLIARKKDWDPKKYGGFDSPTVAYSVLVVAKVEKGKSKKLKSVKELL
GITIMERSSFEKNPIDFLEAKGYKEVKKDLIIKLPKYSLFELENGRKRML
ASAGELQKGNELALPSKYVNFLYLASHYEKLKGSPEDNEQKQLFVEQHKH
YLDEIIEQISEFSKRVILADANLDKVLSAYNKHRDKPIREQAENIIHLFT
LTNLGAPAAFKYFDTTIDRKRYTSTKEVLDATLIHQSITGLYETRIDLSQ
LGGD
109 Cas9 TadAins 768
MDKKYSIGLAIGTNSVGWAVITDEYKVPSKKFKVLGNTDRHSIKKNLIGA
LLFDSGETAEATRLKRTARRRYTRRKNRICYLQEIFSNEMAKVDDSFFHR
LEESFLVEEDKKHERHPIFGNIVDEVAYHEKYPTIYHLRKKLVDSTDKAD
LRLIYLALAHMIKFRGHFLIEGDLNPDNSDVDKLFIQLVQTYNQLFEENP
INASGVDAKAILSARLSKSRRLENLIAQLPGEKKNGLFGNLIALSLGLTP
NFKSNFDLAEDAKLQLSKDTYDDDLDNLLAQIGDQYADLFLAAKNLSDAI
LLSDILRVNTEITKAPLSASMIKRYDEHHQDLTLLKALVRQQLPEKYKEI
FFDQSKNGYAGYIDGGASQEEFYKFIKPILEKMDGTEELLVKLNREDLLR
KQRTFDNGSIPHQIHLGELHAILRRQEDFYPFLKDNREKIEKILTFRIPY
YVGPLARGNSRFAWMTRKSEETITPWNFEEVVDKGASAQSFIERMTNFDK
NLPNEKVLPKHSLLYEYFTVYNELTKVKYVTEGMRKPAFLSGEQKKAIVD
LLFKTNRKVTVKQLKEDYFKKIECFDSVEISGVEDRFNASLGTYHDLLKI
IKDKDFLDNEENEDILEDIVLTLTLFEDREMIEERLKTYAHLFDDKVMKQ
LKRRRYTGWGRLSRKLINGIRDKQSGKTILDFLKSDGFANRNFMQLIHDD
SLTFKEDIQKAQVSGQGDSLHEHIANLAGSPAIKKGILQTVKVVDELVKV
MGRHKPENIVIEMARENQGSSGSETPGTSESATPESSGSEVEFSHEYWMR
HALTLAKRARDEREVPVGAVLVLNNRVIGEGWNRAIGLHDPTAHAEIMAL
RQGGLVMQNYRLIDATLYVTFEPCVMCAGAMIHSRIGRVVFGVRNAKTGA
AGSLMDVLHYPGMNHRVEITEGILADECAALLCYFFRMPRTTQKGQKNSR
ERMKRIEEGIKELGSQILKEHPVENTQLQNEKLYLYYLQNGRDMYVDQEL
DINRLSDYDVDHIVPQSFLKDDSIDNKVLTRSDKNRGKSDNVPSEEVVKK
MKNYWRQLLNAKLITQRKFDNLTKAERGGLSELDKAGFIKRQLVETRQIT
KHVAQILDSRMNTKYDENDKLIREVKVITLKSKLVSDFRKDFQFYKVREI
NNYHHAHDAYLNAVVGTALIKKYPKLESEFVYGDYKVYDVRKMIAKSEQE
IGKATAKYFFYSNIMNFFKTEITLANGEIRKRPLIETNGETGEIVWDKGR
DFATVRKVLSMPQVNIVKKTEVQTGGFSKESILPKRNSDKLIARKKDWDP
KKYGGFDSPTVAYSVLVVAKVEKGKSKKLKSVKELLGITIMERSSFEKNP
IDFLEAKGYKEVKKDLIIKLPKYSLFELENGRKRMLASAGELQKGNELAL
PSKYVNFLYLASHYEKLKGSPEDNEQKQLFVEQHKHYLDEIIEQISEFSK
RVILADANLDKVLSAYNKHRDKPIREQAENIIHLFTLTNLGAPAAFKYFD
TTIDRKRYTSTKEVLDATLIHQSITGLYETRIDLSQLGGD
110.1 Cas9 TadAins 1250
MDKKYSIGLAIGTNSVGWAVITDEYKVPSKKFKVLGNTDRHSIKKNLIGA
LLFDSGETAEATRLKRTARRRYTRRKNRICYLQEIFSNEMAKVDDSFFHR
LEESFLVEEDKKHERHPIFGNIVDEVAYHEKYPTIYHLRKKLVDSTDKAD
LRLIYLALAHMIKFRGHFLIEGDLNPDNSDVDKLFIQLVQTYNQLFEENP
INASGVDAKAILSARLSKSRRLENLIAQLPGEKKNGLFGNLIALSLGLTP
NFKSNFDLAEDAKLQLSKDTYDDDLDNLLAQIGDQYADLFLAAKNLSDAI
LLSDILRVNTEITKAPLSASMIKRYDEHHQDLTLLKALVRQQLPEKYKEI
FFDQSKNGYAGYIDGGASQEEFYKFIKPILEKMDGTEELLVKLNREDLLR
KQRTFDNGSIPHQIHLGELHAILRRQEDFYPFLKDNREKIEKILTFRIPY
YVGPLARGNSRFAWMTRKSEETITPWNFEEVVDKGASAQSFIERMTNFDK
NLPNEKVLPKHSLLYEYFTVYNELTKVKYVTEGMRKPAFLSGEQKKAIVD
LLFKTNRKVTVKQLKEDYFKKIECFDSVEISGVEDRFNASLGTYHDLLKI
IKDKDFLDNEENEDILEDIVLTLTLFEDREMIEERLKTYAHLFDDKVMKQ
LKRRRYTGWGRLSRKLINGIRDKQSGKTILDFLKSDGFANRNFMQLIHDD
SLTFKEDIQKAQVSGQGDSLHEHIANLAGSPAIKKGILQTVKVVDELVKV
MGRHKPENIVIEMARENQTTQKGQKNSRERMKRIEEGIKELGSQILKEHP
VENTQLQNEKLYLYYLQNGRDMYVDQELDINRLSDYDVDHIVPQSFLKDD
SIDNKVLTRSDKNRGKSDNVPSEEVVKKMKNYWRQLLNAKLITQRKFDNL
TKAERGGLSELDKAGFIKRQLVETRQITKHVAQILDSRMNTKYDENDKLI
REVKVITLKSKLVSDFRKDFQFYKVREINNYHHAHDAYLNAVVGTALIKK
YPKLESEFVYGDYKVYDVRKMIAKSEQEIGKATAKYFFYSNIMNFFKTEI
TLANGEIRKRPLIETNGETGEIVWDKGRDFATVRKVLSMPQVNIVKKTEV
QTGGFSKESILPKRNSDKLIARKKDWDPKKYGGFDSPTVAYSVLVVAKVE
KGKSKKLKSVKELLGITIMERSSFEKNPIDFLEAKGYKEVKKDLIIKLPK
YSLFELENGRKRMLASAGELQKGNELALPSKYVNFLYLASHYEKLKGSPG
SSGSETPGTSESATPESSGSEVEFSHEYWMRHALTLAKRARDEREVPVGA
VLVLNNRVIGEGWNRAIGLHDPTAHAEIMALRQGGLVMQNYRLIDATLYV
TFEPCVMCAGAMIHSRIGRVVFGVRNAKTGAAGSLMDVLHYPGMNHRVEI
TEGILADECAALLCYFFRMPREDNEQKQLFVEQHKHYLDEIIEQISEFSK
RVILADANLDKVLSAYNKHRDKPIREQAENIIHLFTLTNLGAPAAFKYFD
TTIDRKRYTSTKEVLDATLIHQSITGLYETRIDLSQLGGD
110.2 Cas9 TadAins 1250
MDKKYSIGLAIGTNSVGWAVITDEYKVPSKKFKVLGNTDRHSIKKNLIGA
LLFDSGETAEATRLKRTARRRYTRRKNRICYLQEIFSNEMAKVDDSFFHR
LEESFLVEEDKKHERHPIFGNIVDEVAYHEKYPTIYHLRKKLVDSTDKAD
LRLIYLALAHMIKFRGHFLIEGDLNPDNSDVDKLFIQLVQTYNQLFEENP
INASGVDAKAILSARLSKSRRLENLIAQLPGEKKNGLFGNLIALSLGLTP
NFKSNFDLAEDAKLQLSKDTYDDDLDNLLAQIGDQYADLFLAAKNLSDAI
LLSDILRVNTEITKAPLSASMIKRYDEHHQDLTLLKALVRQQLPEKYKEI
FFDQSKNGYAGYIDGGASQEEFYKFIKPILEKMDGTEELLVKLNREDLLR
KQRTFDNGSIPHQIHLGELHAILRRQEDFYPFLKDNREKIEKILTFRIPY
YVGPLARGNSRFAWMTRKSEETITPWNFEEVVDKGASAQSFIERMTNFDK
NLPNEKVLPKHSLLYEYFTVYNELTKVKYVTEGMRKPAFLSGEQKKAIVD
LLFKTNRKVTVKQLKEDYFKKIECFDSVEISGVEDRFNASLGTYHDLLKI
IKDKDFLDNEENEDILEDIVLTLTLFEDREMIEERLKTYAHLFDDKVMKQ
LKRRRYTGWGRLSRKLINGIRDKQSGKTILDFLKSDGFANRNFMQLIHDD
SLTFKEDIQKAQVSGQGDSLHEHIANLAGSPAIKKGILQTVKVVDELVKV
MGRHKPENIVIEMARENQTTQKGQKNSRERMKRIEEGIKELGSQILKEHP
VENTQLQNEKLYLYYLQNGRDMYVDQELDINRLSDYDVDHIVPQSFLKDD
SIDNKVLTRSDKNRGKSDNVPSEEVVKKMKNYWRQLLNAKLITQRKFDNL
TKAERGGLSELDKAGFIKRQLVETRQITKHVAQILDSRMNTKYDENDKLI
REVKVITLKSKLVSDFRKDFQFYKVREINNYHHAHDAYLNAVVGTALIKK
YPKLESEFVYGDYKVYDVRKMIAKSEQEIGKATAKYFFYSNIMNFFKTEI
TLANGEIRKRPLIETNGETGEIVWDKGRDFATVRKVLSMPQVNIVKKTEV
QTGGFSKESILPKRNSDKLIARKKDWDPKKYGGFDSPTVAYSVLVVAKVE
KGKSKKLKSVKELLGITIMERSSFEKNPIDFLEAKGYKEVKKDLIIKLPK
YSLFELENGRKRMLASAGELQKGNELALPSKYVNFLYLASHYEKLKGSPG
SSGSSGSETPGTSESATPESSGSEVEFSHEYWMRHALTLAKRARDEREVP
VGAVLVLNNRVIGEGWNRAIGLHDPTAHAEIMALRQGGLVMQNYRLIDAT
LYVTFEPCVMCAGAMIHSRIGRVVFGVRNAKTGAAGSLMDVLHYPGMNHR
VEITEGILADECAALLCYFFRMPREDNEQKQLFVEQHKHYLDEIIEQISE
FSKRVILADANLDKVLSAYNKHRDKPIREQAENIIHLFTLTNLGAPAAFK
YFDTTIDRKRYTSTKEVLDATLIHQSITGLYETRIDLSQLGGD
110.3 Cas9 TadAins 1250
MDKKYSIGLAIGTNSVGWAVITDEYKVPSKKFKVLGNTDRHSIKKNLIGA
LLFDSGETAEATRLKRTARRRYTRRKNRICYLQEIFSNEMAKVDDSFFHR
LEESFLVEEDKKHERHPIFGNIVDEVAYHEKYPTIYHLRKKLVDSTDKAD
LRLIYLALAHMIKFRGHFLIEGDLNPDNSDVDKLFIQLVQTYNQLFEENP
INASGVDAKAILSARLSKSRRLENLIAQLPGEKKNGLFGNLIALSLGLTP
NFKSNFDLAEDAKLQLSKDTYDDDLDNLLAQIGDQYADLFLAAKNLSDAI
LLSDILRVNTEITKAPLSASMIKRYDEHHQDLTLLKALVRQQLPEKYKEI
FFDQSKNGYAGYIDGGASQEEFYKFIKPILEKMDGTEELLVKLNREDLLR
KQRTFDNGSIPHQIHLGELHAILRRQEDFYPFLKDNREKIEKILTFRIPY
YVGPLARGNSRFAWMTRKSEETITPWNFEEVVDKGASAQSFIERMTNFDK
NLPNEKVLPKHSLLYEYFTVYNELTKVKYVTEGMRKPAFLSGEQKKAIVD
LLFKTNRKVTVKQLKEDYFKKIECFDSVEISGVEDRFNASLGTYHDLLKI
IKDKDFLDNEENEDILEDIVLTLTLFEDREMIEERLKTYAHLFDDKVMKQ
LKRRRYTGWGRLSRKLINGIRDKQSGKTILDFLKSDGFANRNFMQLIHDD
SLTFKEDIQKAQVSGQGDSLHEHIANLAGSPAIKKGILQTVKVVDELVKV
MGRHKPENIVIEMARENQTTQKGQKNSRERMKRIEEGIKELGSQILKEHP
VENTQLQNEKLYLYYLQNGRDMYVDQELDINRLSDYDVDHIVPQSFLKDD
SIDNKVLTRSDKNRGKSDNVPSEEVVKKMKNYWRQLLNAKLITQRKFDNL
TKAERGGLSELDKAGFIKRQLVETRQITKHVAQILDSRMNTKYDENDKLI
REVKVITLKSKLVSDFRKDFQFYKVREINNYHHAHDAYLNAVVGTALIKK
YPKLESEFVYGDYKVYDVRKMIAKSEQEIGKATAKYFFYSNIMNFFKTEI
TLANGEIRKRPLIETNGETGEIVWDKGRDFATVRKVLSMPQVNIVKKTEV
QTGGFSKESILPKRNSDKLIARKKDWDPKKYGGFDSPTVAYSVLVVAKVE
KGKSKKLKSVKELLGITIMERSSFEKNPIDFLEAKGYKEVKKDLIIKLPK
YSLFELENGRKRMLASAGELQKGNELALPSKYVNFLYLASHYEKLKGSPG
SSGSSGSETPGTSESATPESGSSSGSEVEFSHEYWMRHALTLAKRARDER
EVPVGAVLVLNNRVIGEGWNRAIGLHDPTAHAEIMALRQGGLVMQNYRLI
DATLYVTFEPCVMCAGAMIHSRIGRVVFGVRNAKTGAAGSLMDVLHYPGM
NHRVEITEGILADECAALLCYFFRMPREDNEQKQLFVEQHKHYLDEIIEQ
ISEFSKRVILADANLDKVLSAYNKHRDKPIREQAENIIHLFTLTNLGAPA
AFKYFDTTIDRKRYTSTKEVLDATLIHQSITGLYETRIDLSQLGGD
110.4 Cas9 TadAins 1250
MDKKYSIGLAIGTNSVGWAVITDEYKVPSKKFKVLGNTDRHSIKKNLIGA
LLFDSGETAEATRLKRTARRRYTRRKNRICYLQEIFSNEMAKVDDSFFHR
LEESFLVEEDKKHERHPIFGNIVDEVAYHEKYPTIYHLRKKLVDSTDKAD
LRLIYLALAHMIKFRGHFLIEGDLNPDNSDVDKLFIQLVQTYNQLFEENP
INASGVDAKAILSARLSKSRRLENLIAQLPGEKKNGLFGNLIALSLGLTP
NFKSNFDLAEDAKLQLSKDTYDDDLDNLLAQIGDQYADLFLAAKNLSDAI
LLSDILRVNTEITKAPLSASMIKRYDEHHQDLTLLKALVRQQLPEKYKEI
FFDQSKNGYAGYIDGGASQEEFYKFIKPILEKMDGTEELLVKLNREDLLR
KQRTFDNGSIPHQIHLGELHAILRRQEDFYPFLKDNREKIEKILTFRIPY
YVGPLARGNSRFAWMTRKSEETITPWNFEEVVDKGASAQSFIERMTNFDK
NLPNEKVLPKHSLLYEYFTVYNELTKVKYVTEGMRKPAFLSGEQKKAIVD
LLFKTNRKVTVKQLKEDYFKKIECFDSVEISGVEDRFNASLGTYHDLLKI
IKDKDFLDNEENEDILEDIVLTLTLFEDREMIEERLKTYAHLFDDKVMKQ
LKRRRYTGWGRLSRKLINGIRDKQSGKTILDFLKSDGFANRNFMQLIHDD
SLTFKEDIQKAQVSGQGDSLHEHIANLAGSPAIKKGILQTVKVVDELVKV
MGRHKPENIVIEMARENQTTQKGQKNSRERMKRIEEGIKELGSQILKEHP
VENTQLQNEKLYLYYLQNGRDMYVDQELDINRLSDYDVDHIVPQSFLKDD
SIDNKVLTRSDKNRGKSDNVPSEEVVKKMKNYWRQLLNAKLITQRKFDNL
TKAERGGLSELDKAGFIKRQLVETRQITKHVAQILDSRMNTKYDENDKLI
REVKVITLKSKLVSDFRKDFQFYKVREINNYHHAHDAYLNAVVGTALIKK
YPKLESEFVYGDYKVYDVRKMIAKSEQEIGKATAKYFFYSNIMNFFKTEI
TLANGEIRKRPLIETNGETGEIVWDKGRDFATVRKVLSMPQVNIVKKTEV
QTGGFSKESILPKRNSDKLIARKKDWDPKKYGGFDSPTVAYSVLVVAKVE
KGKSKKLKSVKELLGITIMERSSFEKNPIDFLEAKGYKEVKKDLIIKLPK
YSLFELENGRKRMLASAGELQKGNELALPSKYVNFLYLASHYEKLKGSPG
SSGSSGSETPGTSESATPESGSSSGSEVEFSHEYWMRHALTLAKRARDER
EVPVGAVLVLNNRVIGEGWNRAIGLHDPTAHAEIMALRQGGLVMQNYRLI
DATLYVTFEPCVMCAGAMIHSRIGRVVFGVRNAKTGAAGSLMDVLHYPGM
NHRVEITEGILADECAALLCYFFRMRREDNEQKQLFVEQHKHYLDEIIEQ
ISEFSKRVILADANLDKVLSAYNKHRDKPIREQAENIIHLFTLTNLGAPA
AFKYFDTTIDRKRYTSTKEVLDATLIHQSITGLYETRIDLSQLGGD
110.5 Cas9 TadAins 1249
MDKKYSIGLAIGTNSVGWAVITDEYKVPSKKFKVLGNTDRHSIKKNLIGA
LLFDSGETAEATRLKRTARRRYTRRKNRICYLQEIFSNEMAKVDDSFFHR
LEESFLVEEDKKHERHPIFGNIVDEVAYHEKYPTIYHLRKKLVDSTDKAD
LRLIYLALAHMIKFRGHFLIEGDLNPDNSDVDKLFIQLVQTYNQLFEENP
INASGVDAKAILSARLSKSRRLENLIAQLPGEKKNGLFGNLIALSLGLTP
NFKSNFDLAEDAKLQLSKDTYDDDLDNLLAQIGDQYADLFLAAKNLSDAI
LLSDILRVNTEITKAPLSASMIKRYDEHHQDLTLLKALVRQQLPEKYKEI
FFDQSKNGYAGYIDGGASQEEFYKFIKPILEKMDGTEELLVKLNREDLLR
KQRTFDNGSIPHQIHLGELHAILRRQEDFYPFLKDNREKIEKILTFRIPY
YVGPLARGNSRFAWMTRKSEETITPWNFEEVVDKGASAQSFIERMTNFDK
NLPNEKVLPKHSLLYEYFTVYNELTKVKYVTEGMRKPAFLSGEQKKAIVD
LLFKTNRKVTVKQLKEDYFKKIECFDSVEISGVEDRFNASLGTYHDLLKI
IKDKDFLDNEENEDILEDIVLTLTLFEDREMIEERLKTYAHLFDDKVMKQ
LKRRRYTGWGRLSRKLINGIRDKQSGKTILDFLKSDGFANRNFMQLIHDD
SLTFKEDIQKAQVSGQGDSLHEHIANLAGSPAIKKGILQTVKVVDELVKV
MGRHKPENIVIEMARENQTTQKGQKNSRERMKRIEEGIKELGSQILKEHP
VENTQLQNEKLYLYYLQNGRDMYVDQELDINRLSDYDVDHIVPQSFLKDD
SIDNKVLTRSDKNRGKSDNVPSEEVVKKMKNYWRQLLNAKLITQRKFDNL
TKAERGGLSELDKAGFIKRQLVETRQITKHVAQILDSRMNTKYDENDKLI
REVKVITLKSKLVSDFRKDFQFYKVREINNYHHAHDAYLNAVVGTALIKK
YPKLESEFVYGDYKVYDVRKMIAKSEQEIGKATAKYFFYSNIMNFFKTEI
TLANGEIRKRPLIETNGETGEIVWDKGRDFATVRKVLSMPQVNIVKKTEV
QTGGFSKESILPKRNSDKLIARKKDWDPKKYGGFDSPTVAYSVLVVAKVE
KGKSKKLKSVKELLGITIMERSSFEKNPIDFLEAKGYKEVKKDLIIKLPK
YSLFELENGRKRMLASAGELQKGNELALPSKYVNFLYLASHYEKLKGSGS
SGSSGSETPGTSESATPESGSSSGSEVEFSHEYWMRHALTLAKRARDERE
VPVGAVLVLNNRVIGEGWNRAIGLHDPTAHAEIMALRQGGLVMQNYRLID
ATLYVTFEPCVMCAGAMIHSRIGRVVFGVRNAKTGAAGSLMDVLHYPGMN
HRVEITEGILADECAALLCYFFRMRRPEDNEQKQLFVEQHKHYLDEIIEQ
ISEFSKRVILADANLDKVLSAYNKHRDKPIREQAENIIHLFTLTNLGAPA
AFKYFDTTIDRKRYTSTKEVLDATLIHQSITGLYETRIDLSQLGGD
110.5 Cas9 TadAins delta 59-66 1250
MDKKYSIGLAIGTNSVGWAVITDEYKVPSKKFKVLGNTDRHSIKKNLIGA
LLFDSGETAEATRLKRTARRRYTRRKNRICYLQEIFSNEMAKVDDSFFHR
LEESFLVEEDKKHERHPIFGNIVDEVAYHEKYPTIYHLRKKLVDSTDKAD
LRLIYLALAHMIKFRGHFLIEGDLNPDNSDVDKLFIQLVQTYNQLFEENP
INASGVDAKAILSARLSKSRRLENLIAQLPGEKKNGLFGNLIALSLGLTP
NFKSNFDLAEDAKLQLSKDTYDDDLDNLLAQIGDQYADLFLAAKNLSDAI
LLSDILRVNTEITKAPLSASMIKRYDEHHQDLTLLKALVRQQLPEKYKEI
FFDQSKNGYAGYIDGGASQEEFYKFIKPILEKMDGTEELLVKLNREDLLR
KQRTFDNGSIPHQIHLGELHAILRRQEDFYPFLKDNREKIEKILTFRIPY
YVGPLARGNSRFAWMTRKSEETITPWNFEEVVDKGASAQSFIERMTNFDK
NLPNEKVLPKHSLLYEYFTVYNELTKVKYVTEGMRKPAFLSGEQKKAIVD
LLFKTNRKVTVKQLKEDYFKKIECFDSVEISGVEDRFNASLGTYHDLLKI
IKDKDFLDNEENEDILEDIVLTLTLFEDREMIEERLKTYAHLFDDKVMKQ
LKRRRYTGWGRLSRKLINGIRDKQSGKTILDFLKSDGFANRNFMQLIHDD
SLTFKEDIQKAQVSGQGDSLHEHIANLAGSPAIKKGILQTVKVVDELVKV
MGRHKPENIVIEMARENQTTQKGQKNSRERMKRIEEGIKELGSQILKEHP
VENTQLQNEKLYLYYLQNGRDMYVDQELDINRLSDYDVDHIVPQSFLKDD
SIDNKVLTRSDKNRGKSDNVPSEEVVKKMKNYWRQLLNAKLITQRKFDNL
TKAERGGLSELDKAGFIKRQLVETRQITKHVAQILDSRMNTKYDENDKLI
REVKVITLKSKLVSDFRKDFQFYKVREINNYHHAHDAYLNAVVGTALIKK
YPKLESEFVYGDYKVYDVRKMIAKSEQEIGKATAKYFFYSNIMNFFKTEI
TLANGEIRKRPLIETNGETGEIVWDKGRDFATVRKVLSMPQVNIVKKTEV
QTGGFSKESILPKRNSDKLIARKKDWDPKKYGGFDSPTVAYSVLVVAKVE
KGKSKKLKSVKELLGITIMERSSFEKNPIDFLEAKGYKEVKKDLIIKLPK
YSLFELENGRKRMLASAGELQKGNELALPSKYVNFLYLASHYEKLKGSPG
SSGSSGSETPGTSESATPESGSSGSEVEFSHEYWMRHALTLAKRARDERE
VPVGAVLVLNNRVIGEGWNRAHAEIMALRQGGLVMQNYRLIDATLYVTFE
PCVMCAGAMIHSRIGRVVFGVRNAKTGAAGSLMDVLHYPGMNHRVEITEG
ILADECAALLCYFFRMPRQVFNAQKKAQSSTDEDNEQKQLFVEQHKHYLD
EIIEQISEFSKRVILADANLDKVLSAYNKHRDKPIREQAENIIHLFTLTN
LGAPAAFKYFDTTIDRKRYTSTKEVLDATLIHQSITGLYETRIDLSQLGG
D
110.6 Cas9 TadAins 1251
MDKKYSIGLAIGTNSVGWAVITDEYKVPSKKFKVLGNTDRHSIKKNLIGA
LLFDSGETAEATRLKRTARRRYTRRKNRICYLQEIFSNEMAKVDDSFFHR
LEESFLVEEDKKHERHPIFGNIVDEVAYHEKYPTIYHLRKKLVDSTDKAD
LRLIYLALAHMIKFRGHFLIEGDLNPDNSDVDKLFIQLVQTYNQLFEENP
INASGVDAKAILSARLSKSRRLENLIAQLPGEKKNGLFGNLIALSLGLTP
NFKSNFDLAEDAKLQLSKDTYDDDLDNLLAQIGDQYADLFLAAKNLSDAI
LLSDILRVNTEITKAPLSASMIKRYDEHHQDLTLLKALVRQQLPEKYKEI
FFDQSKNGYAGYIDGGASQEEFYKFIKPILEKMDGTEELLVKLNREDLLR
KQRTFDNGSIPHQIHLGELHAILRRQEDFYPFLKDNREKIEKILTFRIPY
YVGPLARGNSRFAWMTRKSEETITPWNFEEVVDKGASAQSFIERMTNFDK
NLPNEKVLPKHSLLYEYFTVYNELTKVKYVTEGMRKPAFLSGEQKKAIVD
LLFKTNRKVTVKQLKEDYFKKIECFDSVEISGVEDRFNASLGTYHDLLKI
IKDKDFLDNEENEDILEDIVLTLTLFEDREMIEERLKTYAHLFDDKVMKQ
LKRRRYTGWGRLSRKLINGIRDKQSGKTILDFLKSDGFANRNFMQLIHDD
SLTFKEDIQKAQVSGQGDSLHEHIANLAGSPAIKKGILQTVKVVDELVKV
MGRHKPENIVIEMARENQTTQKGQKNSRERMKRIEEGIKELGSQILKEHP
VENTQLQNEKLYLYYLQNGRDMYVDQELDINRLSDYDVDHIVPQSFLKDD
SIDNKVLTRSDKNRGKSDNVPSEEVVKKMKNYWRQLLNAKLITQRKFDNL
TKAERGGLSELDKAGFIKRQLVETRQITKHVAQILDSRMNTKYDENDKLI
REVKVITLKSKLVSDFRKDFQFYKVREINNYHHAHDAYLNAVVGTALIKK
YPKLESEFVYGDYKVYDVRKMIAKSEQEIGKATAKYFFYSNIMNFFKTEI
TLANGEIRKRPLIETNGETGEIVWDKGRDFATVRKVLSMPQVNIVKKTEV
QTGGFSKESILPKRNSDKLIARKKDWDPKKYGGFDSPTVAYSVLVVAKVE
KGKSKKLKSVKELLGITIMERSSFEKNPIDFLEAKGYKEVKKDLIIKLPK
YSLFELENGRKRMLASAGELQKGNELALPSKYVNFLYLASHYEKLKGSPE
GSSGSSGSETPGTSESATPESGSSSGSEVEFSHEYWMRHALTLAKRARDE
REVPVGAVLVLNNRVIGEGWNRAIGLHDPTAHAEIMALRQGGLVMQNYRL
IDATLYVTFEPCVMCAGAMIHSRIGRVVFGVRNAKTGAAGSLMDVLHYPG
MNHRVEITEGILADECAALLCYFFRMRRDNEQKQLFVEQHKHYLDEIIEQ
ISEFSKRVILADANLDKVLSAYNKHRDKPIREQAENIIHLFTLTNLGAPA
AFKYFDTTIDRKRYTSTKEVLDATLIHQSITGLYETRIDLSQLGGD
110.7 Cas9 TadAins 1252
MDKKYSIGLAIGTNSVGWAVITDEYKVPSKKFKVLGNTDRHSIKKNLIGA
LLFDSGETAEATRLKRTARRRYTRRKNRICYLQEIFSNEMAKVDDSFFHR
LEESFLVEEDKKHERHPIFGNIVDEVAYHEKYPTIYHLRKKLVDSTDKAD
LRLIYLALAHMIKFRGHFLIEGDLNPDNSDVDKLFIQLVQTYNQLFEENP
INASGVDAKAILSARLSKSRRLENLIAQLPGEKKNGLFGNLIALSLGLTP
NFKSNFDLAEDAKLQLSKDTYDDDLDNLLAQIGDQYADLFLAAKNLSDAI
LLSDILRVNTEITKAPLSASMIKRYDEHHQDLTLLKALVRQQLPEKYKEI
FFDQSKNGYAGYIDGGASQEEFYKFIKPILEKMDGTEELLVKLNREDLLR
KQRTFDNGSIPHQIHLGELHAILRRQEDFYPFLKDNREKIEKILTFRIPY
YVGPLARGNSRFAWMTRKSEETITPWNFEEVVDKGASAQSFIERMTNFDK
NLPNEKVLPKHSLLYEYFTVYNELTKVKYVTEGMRKPAFLSGEQKKAIVD
LLFKTNRKVTVKQLKEDYFKKIECFDSVEISGVEDRFNASLGTYHDLLKI
IKDKDFLDNEENEDILEDIVLTLTLFEDREMIEERLKTYAHLFDDKVMKQ
LKRRRYTGWGRLSRKLINGIRDKQSGKTILDFLKSDGFANRNFMQLIHDD
SLTFKEDIQKAQVSGQGDSLHEHIANLAGSPAIKKGILQTVKVVDELVKV
MGRHKPENIVIEMARENQTTQKGQKNSRERMKRIEEGIKELGSQILKEHP
VENTQLQNEKLYLYYLQNGRDMYVDQELDINRLSDYDVDHIVPQSFLKDD
SIDNKVLTRSDKNRGKSDNVPSEEVVKKMKNYWRQLLNAKLITQRKFDNL
TKAERGGLSELDKAGFIKRQLVETRQITKHVAQILDSRMNTKYDENDKLI
REVKVITLKSKLVSDFRKDFQFYKVREINNYHHAHDAYLNAVVGTALIKK
YPKLESEFVYGDYKVYDVRKMIAKSEQEIGKATAKYFFYSNIMNFFKTEI
TLANGEIRKRPLIETNGETGEIVWDKGRDFATVRKVLSMPQVNIVKKTEV
QTGGFSKESILPKRNSDKLIARKKDWDPKKYGGFDSPTVAYSVLVVAKVE
KGKSKKLKSVKELLGITIMERSSFEKNPIDFLEAKGYKEVKKDLIIKLPK
YSLFELENGRKRMLASAGELQKGNELALPSKYVNFLYLASHYEKLKGSPE
DGSSGSSGSETPGTSESATPESGSSSGSEVEFSHEYWMRHALTLAKRARD
EREVPVGAVLVLNNRVIGEGWNRAIGLHDPTAHAEIMALRQGGLVMQNYR
LIDATLYVTFEPCVMCAGAMIHSRIGRVVFGVRNAKTGAAGSLMDVLHYP
GMNHRVEITEGILADECAALLCYFFRMRRNEQKQLFVEQHKHYLDEIIEQ
ISEFSKRVILADANLDKVLSAYNKHRDKPIREQAENIIHLFTLTNLGAPA
AFKYFDTTIDRKRYTSTKEVLDATLIHQSITGLYETRIDLSQLGGD
110.8 Cas9 TadAins delta 59-66 C-truncate 1250
MDKKYSIGLAIGTNSVGWAVITDEYKVPSKKFKVLGNTDRHSIKKNLIGA
LLFDSGETAEATRLKRTARRRYTRRKNRICYLQEIFSNEMAKVDDSFFHR
LEESFLVEEDKKHERHPIFGNIVDEVAYHEKYPTIYHLRKKLVDSTDKAD
LRLIYLALAHMIKFRGHFLIEGDLNPDNSDVDKLFIQLVQTYNQLFEENP
INASGVDAKAILSARLSKSRRLENLIAQLPGEKKNGLFGNLIALSLGLTP
NFKSNFDLAEDAKLQLSKDTYDDDLDNLLAQIGDQYADLFLAAKNLSDAI
LLSDILRVNTEITKAPLSASMIKRYDEHHQDLTLLKALVRQQLPEKYKEI
FFDQSKNGYAGYIDGGASQEEFYKFIKPILEKMDGTEELLVKLNREDLLR
KQRTFDNGSIPHQIHLGELHAILRRQEDFYPFLKDNREKIEKILTFRIPY
YVGPLARGNSRFAWMTRKSEETITPWNFEEVVDKGASAQSFIERMTNFDK
NLPNEKVLPKHSLLYEYFTVYNELTKVKYVTEGMRKPAFLSGEQKKAIVD
LLFKTNRKVTVKQLKEDYFKKIECFDSVEISGVEDRFNASLGTYHDLLKI
IKDKDFLDNEENEDILEDIVLTLTLFEDREMIEERLKTYAHLFDDKVMKQ
LKRRRYTGWGRLSRKLINGIRDKQSGKTILDFLKSDGFANRNFMQLIHDD
SLTFKEDIQKAQVSGQGDSLHEHIANLAGSPAIKKGILQTVKVVDELVKV
MGRHKPENIVIEMARENQTTQKGQKNSRERMKRIEEGIKELGSQILKEHP
VENTQLQNEKLYLYYLQNGRDMYVDQELDINRLSDYDVDHIVPQSFLKDD
SIDNKVLTRSDKNRGKSDNVPSEEVVKKMKNYWRQLLNAKLITQRKFDNL
TKAERGGLSELDKAGFIKRQLVETRQITKHVAQILDSRMNTKYDENDKLI
REVKVITLKSKLVSDFRKDFQFYKVREINNYHHAHDAYLNAVVGTALIKK
YPKLESEFVYGDYKVYDVRKMIAKSEQEIGKATAKYFFYSNIMNFFKTEI
TLANGEIRKRPLIETNGETGEIVWDKGRDFATVRKVLSMPQVNIVKKTEV
QTGGFSKESILPKRNSDKLIARKKDWDPKKYGGFDSPTVAYSVLVVAKVE
KGKSKKLKSVKELLGITIMERSSFEKNPIDFLEAKGYKEVKKDLIIKLPK
YSLFELENGRKRMLASAGELQKGNELALPSKYVNFLYLASHYEKLKGSPG
SSGSETPGTSESATPESSGSEVEFSHEYWMRHALTLAKRARDEREVPVGA
VLVLNNRVIGEGWNRAHAEIMALRQGGLVMQNYRLIDATLYVTFEPCVMC
AGAMIHSRIGRVVFGVRNAKTGAAGSLMDVLHYPGMNHRVEITEGILADE
CAALLCYFFRMPRQEDNEQKQLFVEQHKHYLDEIIEQISEFSKRVILADA
NLDKVLSAYNKHRDKPIREQAENIIHLFTLTNLGAPAAFKYFDTTIDRKR
YTSTKEVLDATLIHQSITGLYETRIDLSQLGGD
111.1 Cas9 TadAins 997
MDKKYSIGLAIGTNSVGWAVITDEYKVPSKKFKVLGNTDRHSIKKNLIGA
LLFDSGETAEATRLKRTARRRYTRRKNRICYLQEIFSNEMAKVDDSFFHR
LEESFLVEEDKKHERHPIFGNIVDEVAYHEKYPTIYHLRKKLVDSTDKAD
LRLIYLALAHMIKFRGHFLIEGDLNPDNSDVDKLFIQLVQTYNQLFEENP
INASGVDAKAILSARLSKSRRLENLIAQLPGEKKNGLFGNLIALSLGLTP
NFKSNFDLAEDAKLQLSKDTYDDDLDNLLAQIGDQYADLFLAAKNLSDAI
LLSDILRVNTEITKAPLSASMIKRYDEHHQDLTLLKALVRQQLPEKYKEI
FFDQSKNGYAGYIDGGASQEEFYKFIKPILEKMDGTEELLVKLNREDLLR
KQRTFDNGSIPHQIHLGELHAILRRQEDFYPFLKDNREKIEKILTFRIPY
YVGPLARGNSRFAWMTRKSEETITPWNFEEVVDKGASAQSFIERMTNFDK
NLPNEKVLPKHSLLYEYFTVYNELTKVKYVTEGMRKPAFLSGEQKKAIVD
LLFKTNRKVTVKQLKEDYFKKIECFDSVEISGVEDRFNASLGTYHDLLKI
IKDKDFLDNEENEDILEDIVLTLTLFEDREMIEERLKTYAHLFDDKVMKQ
LKRRRYTGWGRLSRKLINGIRDKQSGKTILDFLKSDGFANRNFMQLIHDD
SLTFKEDIQKAQVSGQGDSLHEHIANLAGSPAIKKGILQTVKVVDELVKV
MGRHKPENIVIEMARENQTTQKGQKNSRERMKRIEEGIKELGSQILKEHP
VENTQLQNEKLYLYYLQNGRDMYVDQELDINRLSDYDVDHIVPQSFLKDD
SIDNKVLTRSDKNRGKSDNVPSEEVVKKMKNYWRQLLNAKLITQRKFDNL
TKAERGGLSELDKAGFIKRQLVETRQITKHVAQILDSRMNTKYDENDKLI
REVKVITLKSKLVSDFRKDFQFYKVREINNYHHAHDAYLNAVVGTALSHE
YWMRHALTLAKRARDEREVPVGAVLVLNNRVIGEGWNRAIGLHDPTAHAE
IMALRQGGLVMQNYRLIDATLYVTFEPCVMCAGAMIHSRIGRVVFGVRNA
KTGAAGSLMDVLHYPGMNHRVEITEGILADECAALLCYFFRMPRQVFNAQ
KKAQSSTDGSSGSETPGTSESATPESSGIKKYPKLESEFVYGDYKVYDVR
KMIAKSEQEIGKATAKYFFYSNIMNFFKTEITLANGEIRKRPLIETNGET
GEIVWDKGRDFATVRKVLSMPQVNIVKKTEVQTGGFSKESILPKRNSDKL
IARKKDWDPKKYGGFDSPTVAYSVLVVAKVEKGKSKKLKSVKELLGITIM
ERSSFEKNPIDFLEAKGYKEVKKDLIIKLPKYSLFELENGRKRMLASAGE
LQKGNELALPSKYVNFLYLASHYEKLKGSPEDNEQKQLFVEQHKHYLDEI
IEQISEFSKRVILADANLDKVLSAYNKHRDKPIREQAENIIHLFTLTNLG
APAAFKYFDTTIDRKRYTSTKEVLDATLIHQSITGLYETRIDLSQLGGD
111.2 Cas9 TadAins 997
MDKKYSIGLAIGTNSVGWAVITDEYKVPSKKFKVLGNTDRHSIKKNLIGA
LLFDSGETAEATRLKRTARRRYTRRKNRICYLQEIFSNEMAKVDDSFFHR
LEESFLVEEDKKHERHPIFGNIVDEVAYHEKYPTIYHLRKKLVDSTDKAD
LRLIYLALAHMIKFRGHFLIEGDLNPDNSDVDKLFIQLVQTYNQLFEENP
INASGVDAKAILSARLSKSRRLENLIAQLPGEKKNGLFGNLIALSLGLTP
NFKSNFDLAEDAKLQLSKDTYDDDLDNLLAQIGDQYADLFLAAKNLSDAI
LLSDILRVNTEITKAPLSASMIKRYDEHHQDLTLLKALVRQQLPEKYKEI
FFDQSKNGYAGYIDGGASQEEFYKFIKPILEKMDGTEELLVKLNREDLLR
KQRTFDNGSIPHQIHLGELHAILRRQEDFYPFLKDNREKIEKILTFRIPY
YVGPLARGNSRFAWMTRKSEETITPWNFEEVVDKGASAQSFIERMTNFDK
NLPNEKVLPKHSLLYEYFTVYNELTKVKYVTEGMRKPAFLSGEQKKAIVD
LLFKTNRKVTVKQLKEDYFKKIECFDSVEISGVEDRFNASLGTYHDLLKI
IKDKDFLDNEENEDILEDIVLTLTLFEDREMIEERLKTYAHLFDDKVMKQ
LKRRRYTGWGRLSRKLINGIRDKQSGKTILDFLKSDGFANRNFMQLIHDD
SLTFKEDIQKAQVSGQGDSLHEHIANLAGSPAIKKGILQTVKVVDELVKV
MGRHKPENIVIEMARENQTTQKGQKNSRERMKRIEEGIKELGSQILKEHP
VENTQLQNEKLYLYYLQNGRDMYVDQELDINRLSDYDVDHIVPQSFLKDD
SIDNKVLTRSDKNRGKSDNVPSEEVVKKMKNYWRQLLNAKLITQRKFDNL
TKAERGGLSELDKAGFIKRQLVETRQITKHVAQILDSRMNTKYDENDKLI
REVKVITLKSKLVSDFRKDFQFYKVREINNYHHAHDAYLNAVVGTALSHE
YWMRHALTLAKRARDEREVPVGAVLVLNNRVIGEGWNRAIGLHDPTAHAE
IMALRQGGLVMQNYRLIDATLYVTFEPCVMCAGAMIHSRIGRVVFGVRNA
KTGAAGSLMDVLHYPGMNHRVEITEGILADECAALLCYFFRMPRQVFNAQ
KKAQSSTDGSSGSSGSETPGTSESATPESSGGSSIKKYPKLESEFVYGDY
KVYDVRKMIAKSEQEIGKATAKYFFYSNIMNFFKTEITLANGEIRKRPLI
ETNGETGEIVWDKGRDFATVRKVLSMPQVNIVKKTEVQTGGFSKESILPK
RNSDKLIARKKDWDPKKYGGFDSPTVAYSVLVVAKVEKGKSKKLKSVKEL
LGITIMERSSFEKNPIDFLEAKGYKEVKKDLIIKLPKYSLFELENGRKRM
LASAGELQKGNELALPSKYVNFLYLASHYEKLKGSPEDNEQKQLFVEQHK
HYLDEIIEQISEFSKRVILADANLDKVLSAYNKHRDKPIREQAENIIHLF
TLTNLGAPAAFKYFDTTIDRKRYTSTKEVLDATLIHQSITGLYETRIDLS
QLGGD
112 delta HNH TadA
MDKKYSIGLAIGTNSVGWAVITDEYKVPSKKFKVLGNTDRHSIKKNLIGA
LLFDSGETAEATRLKRTARRRYTRRKNRICYLQEIFSNEMAKVDDSFFHR
LEESFLVEEDKKHERHPIFGNIVDEVAYHEKYPTIYHLRKKLVDSTDKAD
LRLIYLALAHMIKFRGHFLIEGDLNPDNSDVDKLFIQLVQTYNQLFEENP
INASGVDAKAILSARLSKSRRLENLIAQLPGEKKNGLFGNLIALSLGLTP
NFKSNFDLAEDAKLQLSKDTYDDDLDNLLAQIGDQYADLFLAAKNLSDAI
LLSDILRVNTEITKAPLSASMIKRYDEHHQDLTLLKALVRQQLPEKYKEI
FFDQSKNGYAGYIDGGASQEEFYKFIKPILEKMDGTEELLVKLNREDLLR
KQRTFDNGSIPHQIHLGELHAILRRQEDFYPFLKDNREKIEKILTFRIPY
YVGPLARGNSRFAWMTRKSEETITPWNFEEVVDKGASAQSFIERMTNFDK
NLPNEKVLPKHSLLYEYFTVYNELTKVKYVTEGMRKPAFLSGEQKKAIVD
LLFKTNRKVTVKQLKEDYFKKIECFDSVEISGVEDRFNASLGTYHDLLKI
IKDKDFLDNEENEDILEDIVLTLTLFEDREMIEERLKTYAHLFDDKVMKQ
LKRRRYTGWGRLSRKLINGIRDKQSGKTILDFLKSDGFANRNFMQLIHDD
SLTFKEDIQKAQVSGQGDSLHEHIANLAGSPAIKKGILQTVKVVDELVKV
MGRHKPENIVIEMARENQTTQKGQKNSRERMKRIEEGIKELGSEVEFSHE
YWMRHALTLAKRARDEREVPVGAVLVLNNRVIGEGWNRAIGLHDPTAHAE
IMALRQGGLVMQNYRLIDATLYVTFEPCVMCAGAMIHSRIGRVVFGVRNA
KTGAAGSLMDVLHYPGMNHRVEITEGILADECAALLCYFFRMPRQVFNAQ
KKAQSSTDGGLSELDKAGFIKRQLVETRQITKHVAQILDSRMNTKYDEND
KLIREVKVITLKSKLVSDFRKDFQFYKVREINNYHHAHDAYLNAVVGTAL
IKKYPKLESEFVYGDYKVYDVRKMIAKSEQEIGKATAKYFFYSNIMNFFK
TEITLANGEIRKRPLIETNGETGEIVWDKGRDFATVRKVLSMPQVNIVKK
TEVQTGGFSKESILPKRNSDKLIARKKDWDPKKYGGFDSPTVAYSVLVVA
KVEKGKSKKLKSVKELLGITIMERSSFEKNPIDFLEAKGYKEVKKDLIIK
LPKYSLFELENGRKRMLASAGELQKGNELALPSKYVNFLYLASHYEKLKG
SPEDNEQKQLFVEQHKHYLDEIIEQISEFSKRVILADANLDKVLSAYNKH
RDKPIREQAENIIHLFTLTNLGAPAAFKYFDTTIDRKRYTSTKEVLDATL
IHQSITGLYETRIDLSQLGGD
113 N-term single TadA helix trunc 165-end
MSEVEFSHEYWMRHALTLAKRARDEREVPVGAVLVLNNRVIGEGWNRAIG
LHDPTAHAEIMALRQGGLVMQNYRLIDATLYVTFEPCVMCAGAMIHSRIG
RVVFGVRNAKTGAAGSLMDVLHYPGMNHRVEITEGILADECAALLCYFFR
MPRSGGSSGGSSGSETPGTSESATPESSGGSSGGSDKKYSIGLAIGTNSV
GWAVITDEYKVPSKKFKVLGNTDRHSIKKNLIGALLFDSGETAEATRLKR
TARRRYTRRKNRICYLQEIFSNEMAKVDDSFFHRLEESFLVEEDKKHERH
PIFGNIVDEVAYHEKYPTIYHLRKKLVDSTDKADLRLIYLALAHMIKFRG
HFLIEGDLNPDNSDVDKLFIQLVQTYNQLFEENPINASGVDAKAILSARL
SKSRRLENLIAQLPGEKKNGLFGNLIALSLGLTPNFKSNFDLAEDAKLQL
SKDTYDDDLDNLLAQIGDQYADLFLAAKNLSDAILLSDILRVNTEITKAP
LSASMIKRYDEHHQDLTLLKALVRQQLPEKYKEIFFDQSKNGYAGYIDGG
ASQEEFYKFIKPILEKMDGTEELLVKLNREDLLRKQRTFDNGSIPHQIHL
GELHAILRRQEDFYPFLKDNREKIEKILTFRIPYYVGPLARGNSRFAWMT
RKSEETITPWNFEEVVDKGASAQSFIERMTNFDKNLPNEKVLPKHSLLYE
YFTVYNELTKVKYVTEGMRKPAFLSGEQKKAIVDLLFKTNRKVTVKQLKE
DYFKKIECFDSVEISGVEDRFNASLGTYHDLLKIIKDKDFLDNEENEDIL
EDIVLTLTLFEDREMIEERLKTYAHLFDDKVMKQLKRRRYTGWGRLSRKL
INGIRDKQSGKTILDFLKSDGFANRNFMQLIHDDSLTFKEDIQKAQVSGQ
GDSLHEHIANLAGSPAIKKGILQTVKVVDELVKVMGRHKPENIVIEMARE
NQTTQKGQKNSRERMKRIEEGIKELGSQILKEHPVENTQLQNEKLYLYYL
QNGRDMYVDQELDINRLSDYDVDHIVPQSFLKDDSIDNKVLTRSDKNRGK
SDNVPSEEVVKKMKNYWRQLLNAKLITQRKFDNLTKAERGGLSELDKAGF
IKRQLVETRQITKHVAQILDSRMNTKYDENDKLIREVKVITLKSKLVSDF
RKDFQFYKVREINNYHHAHDAYLNAVVGTALIKKYPKLESEFVYGDYKVY
DVRKMIAKSEQEIGKATAKYFFYSNIMNFFKTEITLANGEIRKRPLIETN
GETGEIVWDKGRDFATVRKVLSMPQVNIVKKTEVQTGGFSKESILPKRNS
DKLIARKKDWDPKKYGGFDSPTVAYSVLVVAKVEKGKSKKLKSVKELLGI
TIMERSSFEKNPIDFLEAKGYKEVKKDLIIKLPKYSLFELENGRKRMLAS
AGELQKGNELALPSKYVNFLYLASHYEKLKGSPEDNEQKQLFVEQHKHYL
DEIIEQISEFSKRVILADANLDKVLSAYNKHRDKPIREQAENIIHLFTLT
NLGAPAAFKYFDTTIDRKRYTSTKEVLDATLIHQSITGLYETRIDLSQLG
GD
114 N-term single TadA helix trunc 165-end delta
59-65
MSEVEFSHEYWMRHALTLAKRARDEREVPVGAVLVLNNRVIGEGWNRTAH
AEIMALRQGGLVMQNYRLIDATLYVTFEPCVMCAGAMIHSRIGRVVFGVR
NAKTGAAGSLMDVLHYPGMNHRVEITEGILADECAALLCYFFRMPRSGGS
SGGSSGSETPGTSESATPESSGGSSGGSDKKYSIGLAIGTNSVGWAVITD
EYKVPSKKFKVLGNTDRHSIKKNLIGALLFDSGETAEATRLKRTARRRYT
RRKNRICYLQEIFSNEMAKVDDSFFHRLEESFLVEEDKKHERHPIFGNIV
DEVAYHEKYPTIYHLRKKLVDSTDKADLRLIYLALAHMIKFRGHFLIEGD
LNPDNSDVDKLFIQLVQTYNQLFEENPINASGVDAKAILSARLSKSRRLE
NLIAQLPGEKKNGLFGNLIALSLGLTPNFKSNFDLAEDAKLQLSKDTYDD
DLDNLLAQIGDQYADLFLAAKNLSDAILLSDILRVNTEITKAPLSASMIK
RYDEHHQDLTLLKALVRQQLPEKYKEIFFDQSKNGYAGYIDGGASQEEFY
KFIKPILEKMDGTEELLVKLNREDLLRKQRTFDNGSIPHQIHLGELHAIL
RRQEDFYPFLKDNREKIEKILTFRIPYYVGPLARGNSRFAWMTRKSEETI
TPWNFEEVVDKGASAQSFIERMTNFDKNLPNEKVLPKHSLLYEYFTVYNE
LTKVKYVTEGMRKPAFLSGEQKKAIVDLLFKTNRKVTVKQLKEDYFKKIE
CFDSVEISGVEDRFNASLGTYHDLLKIIKDKDFLDNEENEDILEDIVLTL
TLFEDREMIEERLKTYAHLFDDKVMKQLKRRRYTGWGRLSRKLINGIRDK
QSGKTILDFLKSDGFANRNFMQLIHDDSLTFKEDIQKAQVSGQGDSLHEH
IANLAGSPAIKKGILQTVKVVDELVKVMGRHKPENIVIEMARENQTTQKG
QKNSRERMKRIEEGIKELGSQILKEHPVENTQLQNEKLYLYYLQNGRDMY
VDQELDINRLSDYDVDHIVPQSFLKDDSIDNKVLTRSDKNRGKSDNVPSE
EVVKKMKNYWRQLLNAKLITQRKFDNLTKAERGGLSELDKAGFIKRQLVE
TRQITKHVAQILDSRMNTKYDENDKLIREVKVITLKSKLVSDFRKDFQFY
KVREINNYHHAHDAYLNAVVGTALIKKYPKLESEFVYGDYKVYDVRKMIA
KSEQEIGKATAKYFFYSNIMNFFKTEITLANGEIRKRPLIETNGETGEIV
WDKGRDFATVRKVLSMPQVNIVKKTEVQTGGFSKESILPKRNSDKLIARK
KDWDPKKYGGFDSPTVAYSVLVVAKVEKGKSKKLKSVKELLGITIMERSS
FEKNPIDFLEAKGYKEVKKDLIIKLPKYSLFELENGRKRMLASAGELQKG
NELALPSKYVNFLYLASHYEKLKGSPEDNEQKQLFVEQHKHYLDEIIEQI
SEFSKRVILADANLDKVLSAYNKHRDKPIREQAENIIHLFTLTNLGAPAA
FKYFDTTIDRKRYTSTKEVLDATLIHQSITGLYETRIDLSQLGGD
115.1 Cas9 TadAins1004
MDKKYSIGLAIGTNSVGWAVITDEYKVPSKKFKVLGNTDRHSIKKNLIGA
LLFDSGETAEATRLKRTARRRYTRRKNRICYLQEIFSNEMAKVDDSFFHR
LEESFLVEEDKKHERHPIFGNIVDEVAYHEKYPTIYHLRKKLVDSTDKAD
LRLIYLALAHMIKFRGHFLIEGDLNPDNSDVDKLFIQLVQTYNQLFEENP
INASGVDAKAILSARLSKSRRLENLIAQLPGEKKNGLFGNLIALSLGLTP
NFKSNFDLAEDAKLQLSKDTYDDDLDNLLAQIGDQYADLFLAAKNLSDAI
LLSDILRVNTEITKAPLSASMIKRYDEHHQDLTLLKALVRQQLPEKYKEI
FFDQSKNGYAGYIDGGASQEEFYKFIKPILEKMDGTEELLVKLNREDLLR
KQRTFDNGSIPHQIHLGELHAILRRQEDFYPFLKDNREKIEKILTFRIPY
YVGPLARGNSRFAWMTRKSEETITPWNFEEVVDKGASAQSFIERMTNFDK
NLPNEKVLPKHSLLYEYFTVYNELTKVKYVTEGMRKPAFLSGEQKKAIVD
LLFKTNRKVTVKQLKEDYFKKIECFDSVEISGVEDRFNASLGTYHDLLKI
IKDKDFLDNEENEDILEDIVLTLTLFEDREMIEERLKTYAHLFDDKVMKQ
LKRRRYTGWGRLSRKLINGIRDKQSGKTILDFLKSDGFANRNFMQLIHDD
SLTFKEDIQKAQVSGQGDSLHEHIANLAGSPAIKKGILQTVKVVDELVKV
MGRHKPENIVIEMARENQTTQKGQKNSRERMKRIEEGIKELGSQILKEHP
VENTQLQNEKLYLYYLQNGRDMYVDQELDINRLSDYDVDHIVPQSFLKDD
SIDNKVLTRSDKNRGKSDNVPSEEVVKKMKNYWRQLLNAKLITQRKFDNL
TKAERGGLSELDKAGFIKRQLVETRQITKHVAQILDSRMNTKYDENDKLI
REVKVITLKSKLVSDFRKDFQFYKVREINNYHHAHDAYLNAVVGTALIKK
YPKGSSGSETPGTSESATPESSGSEVEFSHEYWMRHALTLAKRARDEREV
PVGAVLVLNNRVIGEGWNRAIGLHDPTAHAEIMALRQGGLVMQNYRLIDA
TLYVTFEPCVMCAGAMIHSRIGRVVFGVRNAKTGAAGSLMDVLHYPGMNH
RVEITEGILADECAALLCYFFRMPRQLESEFVYGDYKVYDVRKMIAKSEQ
EIGKATAKYFFYSNIMNFFKTEITLANGEIRKRPLIETNGETGEIVWDKG
RDFATVRKVLSMPQVNIVKKTEVQTGGFSKESILPKRNSDKLIARKKDWD
PKKYGGFDSPTVAYSVLVVAKVEKGKSKKLKSVKELLGITIMERSSFEKN
PIDFLEAKGYKEVKKDLIIKLPKYSLFELENGRKRMLASAGELQKGNELA
LPSKYVNFLYLASHYEKLKGSPEDNEQKQLFVEQHKHYLDEIIEQISEFS
KRVILADANLDKVLSAYNKHRDKPIREQAENIIHLFTLTNLGAPAAFKYF
DTTIDRKRYTSTKEVLDATLIHQSITGLYETRIDLSQLGGD
115.2 Cas9 TadAins1005
MDKKYSIGLAIGTNSVGWAVITDEYKVPSKKFKVLGNTDRHSIKKNLIGA
LLFDSGETAEATRLKRTARRRYTRRKNRICYLQEIFSNEMAKVDDSFFHR
LEESFLVEEDKKHERHPIFGNIVDEVAYHEKYPTIYHLRKKLVDSTDKAD
LRLIYLALAHMIKFRGHFLIEGDLNPDNSDVDKLFIQLVQTYNQLFEENP
INASGVDAKAILSARLSKSRRLENLIAQLPGEKKNGLFGNLIALSLGLTP
NFKSNFDLAEDAKLQLSKDTYDDDLDNLLAQIGDQYADLFLAAKNLSDAI
LLSDILRVNTEITKAPLSASMIKRYDEHHQDLTLLKALVRQQLPEKYKEI
FFDQSKNGYAGYIDGGASQEEFYKFIKPILEKMDGTEELLVKLNREDLLR
KQRTFDNGSIPHQIHLGELHAILRRQEDFYPFLKDNREKIEKILTFRIPY
YVGPLARGNSRFAWMTRKSEETITPWNFEEVVDKGASAQSFIERMTNFDK
NLPNEKVLPKHSLLYEYFTVYNELTKVKYVTEGMRKPAFLSGEQKKAIVD
LLFKTNRKVTVKQLKEDYFKKIECFDSVEISGVEDRFNASLGTYHDLLKI
IKDKDFLDNEENEDILEDIVLTLTLFEDREMIEERLKTYAHLFDDKVMKQ
LKRRRYTGWGRLSRKLINGIRDKQSGKTILDFLKSDGFANRNFMQLIHDD
SLTFKEDIQKAQVSGQGDSLHEHIANLAGSPAIKKGILQTVKVVDELVKV
MGRHKPENIVIEMARENQTTQKGQKNSRERMKRIEEGIKELGSQILKEHP
VENTQLQNEKLYLYYLQNGRDMYVDQELDINRLSDYDVDHIVPQSFLKDD
SIDNKVLTRSDKNRGKSDNVPSEEVVKKMKNYWRQLLNAKLITQRKFDNL
TKAERGGLSELDKAGFIKRQLVETRQITKHVAQILDSRMNTKYDENDKLI
REVKVITLKSKLVSDFRKDFQFYKVREINNYHHAHDAYLNAVVGTALIKK
YPKLGSSGSETPGTSESATPESSGSEVEFSHEYWMRHALTLAKRARDERE
VPVGAVLVLNNRVIGEGWNRAIGLHDPTAHAEIMALRQGGLVMQNYRLID
ATLYVTFEPCVMCAGAMIHSRIGRVVFGVRNAKTGAAGSLMDVLHYPGMN
HRVEITEGILADECAALLCYFFRMPRQESEFVYGDYKVYDVRKMIAKSEQ
EIGKATAKYFFYSNIMNFFKTEITLANGEIRKRPLIETNGETGEIVWDKG
RDFATVRKVLSMPQVNIVKKTEVQTGGFSKESILPKRNSDKLIARKKDWD
PKKYGGFDSPTVAYSVLVVAKVEKGKSKKLKSVKELLGITIMERSSFEKN
PIDFLEAKGYKEVKKDLIIKLPKYSLFELENGRKRMLASAGELQKGNELA
LPSKYVNFLYLASHYEKLKGSPEDNEQKQLFVEQHKHYLDEIIEQISEFS
KRVILADANLDKVLSAYNKHRDKPIREQAENIIHLFTLTNLGAPAAFKYF
DTTIDRKRYTSTKEVLDATLIHQSITGLYETRIDLSQLGGD
115.3 Cas9 TadAins1006
MDKKYSIGLAIGTNSVGWAVITDEYKVPSKKFKVLGNTDRHSIKKNLIGA
LLFDSGETAEATRLKRTARRRYTRRKNRICYLQEIFSNEMAKVDDSFFHR
LEESFLVEEDKKHERHPIFGNIVDEVAYHEKYPTIYHLRKKLVDSTDKAD
LRLIYLALAHMIKFRGHFLIEGDLNPDNSDVDKLFIQLVQTYNQLFEENP
INASGVDAKAILSARLSKSRRLENLIAQLPGEKKNGLFGNLIALSLGLTP
NFKSNFDLAEDAKLQLSKDTYDDDLDNLLAQIGDQYADLFLAAKNLSDAI
LLSDILRVNTEITKAPLSASMIKRYDEHHQDLTLLKALVRQQLPEKYKEI
FFDQSKNGYAGYIDGGASQEEFYKFIKPILEKMDGTEELLVKLNREDLLR
KQRTFDNGSIPHQIHLGELHAILRRQEDFYPFLKDNREKIEKILTFRIPY
YVGPLARGNSRFAWMTRKSEETITPWNFEEVVDKGASAQSFIERMTNFDK
NLPNEKVLPKHSLLYEYFTVYNELTKVKYVTEGMRKPAFLSGEQKKAIVD
LLFKTNRKVTVKQLKEDYFKKIECFDSVEISGVEDRFNASLGTYHDLLKI
IKDKDFLDNEENEDILEDIVLTLTLFEDREMIEERLKTYAHLFDDKVMKQ
LKRRRYTGWGRLSRKLINGIRDKQSGKTILDFLKSDGFANRNFMQLIHDD
SLTFKEDIQKAQVSGQGDSLHEHIANLAGSPAIKKGILQTVKVVDELVKV
MGRHKPENIVIEMARENQTTQKGQKNSRERMKRIEEGIKELGSQILKEHP
VENTQLQNEKLYLYYLQNGRDMYVDQELDINRLSDYDVDHIVPQSFLKDD
SIDNKVLTRSDKNRGKSDNVPSEEVVKKMKNYWRQLLNAKLITQRKFDNL
TKAERGGLSELDKAGFIKRQLVETRQITKHVAQILDSRMNTKYDENDKLI
REVKVITLKSKLVSDFRKDFQFYKVREINNYHHAHDAYLNAVVGTALIKK
YPKLEGSSGSETPGTSESATPESSGSEVEFSHEYWMRHALTLAKRARDER
EVPVGAVLVLNNRVIGEGWNRAIGLHDPTAHAEIMALRQGGLVMQNYRLI
DATLYVTFEPCVMCAGAMIHSRIGRVVFGVRNAKTGAAGSLMDVLHYPGM
NHRVEITEGILADECAALLCYFFRMPRQSEFVYGDYKVYDVRKMIAKSEQ
EIGKATAKYFFYSNIMNFFKTEITLANGEIRKRPLIETNGETGEIVWDKG
RDFATVRKVLSMPQVNIVKKTEVQTGGFSKESILPKRNSDKLIARKKDWD
PKKYGGFDSPTVAYSVLVVAKVEKGKSKKLKSVKELLGITIMERSSFEKN
PIDFLEAKGYKEVKKDLIIKLPKYSLFELENGRKRMLASAGELQKGNELA
LPSKYVNFLYLASHYEKLKGSPEDNEQKQLFVEQHKHYLDEIIEQISEFS
KRVILADANLDKVLSAYNKHRDKPIREQAENIIHLFTLTNLGAPAAFKYF
DTTIDRKRYTSTKEVLDATLIHQSITGLYETRIDLSQLGGD
115.4 Cas9 TadAins1007
MDKKYSIGLAIGTNSVGWAVITDEYKVPSKKFKVLGNTDRHSIKKNLIGA
LLFDSGETAEATRLKRTARRRYTRRKNRICYLQEIFSNEMAKVDDSFFHR
LEESFLVEEDKKHERHPIFGNIVDEVAYHEKYPTIYHLRKKLVDSTDKAD
LRLIYLALAHMIKFRGHFLIEGDLNPDNSDVDKLFIQLVQTYNQLFEENP
INASGVDAKAILSARLSKSRRLENLIAQLPGEKKNGLFGNLIALSLGLTP
NFKSNFDLAEDAKLQLSKDTYDDDLDNLLAQIGDQYADLFLAAKNLSDAI
LLSDILRVNTEITKAPLSASMIKRYDEHHQDLTLLKALVRQQLPEKYKEI
FFDQSKNGYAGYIDGGASQEEFYKFIKPILEKMDGTEELLVKLNREDLLR
KQRTFDNGSIPHQIHLGELHAILRRQEDFYPFLKDNREKIEKILTFRIPY
YVGPLARGNSRFAWMTRKSEETITPWNFEEVVDKGASAQSFIERMTNFDK
NLPNEKVLPKHSLLYEYFTVYNELTKVKYVTEGMRKPAFLSGEQKKAIVD
LLFKTNRKVTVKQLKEDYFKKIECFDSVEISGVEDRFNASLGTYHDLLKI
IKDKDFLDNEENEDILEDIVLTLTLFEDREMIEERLKTYAHLFDDKVMKQ
LKRRRYTGWGRLSRKLINGIRDKQSGKTILDFLKSDGFANRNFMQLIHDD
SLTFKEDIQKAQVSGQGDSLHEHIANLAGSPAIKKGILQTVKVVDELVKV
MGRHKPENIVIEMARENQTTQKGQKNSRERMKRIEEGIKELGSQILKEHP
VENTQLQNEKLYLYYLQNGRDMYVDQELDINRLSDYDVDHIVPQSFLKDD
SIDNKVLTRSDKNRGKSDNVPSEEVVKKMKNYWRQLLNAKLITQRKFDNL
TKAERGGLSELDKAGFIKRQLVETRQITKHVAQILDSRMNTKYDENDKLI
REVKVITLKSKLVSDFRKDFQFYKVREINNYHHAHDAYLNAVVGTALIKK
YPKLESGSSGSETPGTSESATPESSGSEVEFSHEYWMRHALTLAKRARDE
REVPVGAVLVLNNRVIGEGWNRAIGLHDPTAHAEIMALRQGGLVMQNYRL
IDATLYVTFEPCVMCAGAMIHSRIGRVVFGVRNAKTGAAGSLMDVLHYPG
MNHRVEITEGILADECAALLCYFFRMPRQEFVYGDYKVYDVRKMIAKSEQ
EIGKATAKYFFYSNIMNFFKTEITLANGEIRKRPLIETNGETGEIVWDKG
RDFATVRKVLSMPQVNIVKKTEVQTGGFSKESILPKRNSDKLIARKKDWD
PKKYGGFDSPTVAYSVLVVAKVEKGKSKKLKSVKELLGITIMERSSFEKN
PIDFLEAKGYKEVKKDLIIKLPKYSLFELENGRKRMLASAGELQKGNELA
LPSKYVNFLYLASHYEKLKGSPEDNEQKQLFVEQHKHYLDEIIEQISEFS
KRVILADANLDKVLSAYNKHRDKPIREQAENIIHLFTLTNLGAPAAFKYF
DTTIDRKRYTSTKEVLDATLIHQSITGLYETRIDLSQLGGD
116.1 Cas9 TadAins C-term truncate2 792
MDKKYSIGLAIGTNSVGWAVITDEYKVPSKKFKVLGNTDRHSIKKNLIGA
LLFDSGETAEATRLKRTARRRYTRRKNRICYLQEIFSNEMAKVDDSFFHR
LEESFLVEEDKKHERHPIFGNIVDEVAYHEKYPTIYHLRKKLVDSTDKAD
LRLIYLALAHMIKFRGHFLIEGDLNPDNSDVDKLFIQLVQTYNQLFEENP
INASGVDAKAILSARLSKSRRLENLIAQLPGEKKNGLFGNLIALSLGLTP
NFKSNFDLAEDAKLQLSKDTYDDDLDNLLAQIGDQYADLFLAAKNLSDAI
LLSDILRVNTEITKAPLSASMIKRYDEHHQDLTLLKALVRQQLPEKYKEI
FFDQSKNGYAGYIDGGASQEEFYKFIKPILEKMDGTEELLVKLNREDLLR
KQRTFDNGSIPHQIHLGELHAILRRQEDFYPFLKDNREKIEKILTFRIPY
YVGPLARGNSRFAWMTRKSEETITPWNFEEVVDKGASAQSFIERMTNFDK
NLPNEKVLPKHSLLYEYFTVYNELTKVKYVTEGMRKPAFLSGEQKKAIVD
LLFKTNRKVTVKQLKEDYFKKIECFDSVEISGVEDRFNASLGTYHDLLKI
IKDKDFLDNEENEDILEDIVLTLTLFEDREMIEERLKTYAHLFDDKVMKQ
LKRRRYTGWGRLSRKLINGIRDKQSGKTILDFLKSDGFANRNFMQLIHDD
SLTFKEDIQKAQVSGQGDSLHEHIANLAGSPAIKKGILQTVKVVDELVKV
MGRHKPENIVIEMARENQTTQKGQKNSRERMKRIEEGIKELGGSSGSETP
GTSESATPESSGSEVEFSHEYWMRHALTLAKRARDEREVPVGAVLVLNNR
VIGEGWNRAIGLHDPTAHAEIMALRQGGLVMQNYRLIDATLYVTFEPCVM
CAGAMIHSRIGRVVFGVRNAKTGAAGSLMDVLHYPGMNHRVEITEGILAD
ECAALLCYFFRMPRQSQILKEHPVENTQLQNEKLYLYYLQNGRDMYVDQE
LDINRLSDYDVDHIVPQSFLKDDSIDNKVLTRSDKNRGKSDNVPSEEVVK
KMKNYWRQLLNAKLITQRKFDNLTKAERGGLSELDKAGFIKRQLVETRQI
TKHVAQILDSRMNTKYDENDKLIREVKVITLKSKLVSDFRKDFQFYKVRE
INNYHHAHDAYLNAVVGTALIKKYPKLESEFVYGDYKVYDVRKMIAKSEQ
EIGKATAKYFFYSNIMNFFKTEITLANGEIRKRPLIETNGETGEIVWDKG
RDFATVRKVLSMPQVNIVKKTEVQTGGFSKESILPKRNSDKLIARKKDWD
PKKYGGFDSPTVAYSVLVVAKVEKGKSKKLKSVKELLGITIMERSSFEKN
PIDFLEAKGYKEVKKDLIIKLPKYSLFELENGRKRMLASAGELQKGNELA
LPSKYVNFLYLASHYEKLKGSPEDNEQKQLFVEQHKHYLDEIIEQISEFS
KRVILADANLDKVLSAYNKHRDKPIREQAENIIHLFTLTNLGAPAAFKYF
DTTIDRKRYTSTKEVLDATLIHQSITGLYETRIDLSQLGGD
116.2 Cas9 TadAins C-term truncate2 791
MDKKYSIGLAIGTNSVGWAVITDEYKVPSKKFKVLGNTDRHSIKKNLIGA
LLFDSGETAEATRLKRTARRRYTRRKNRICYLQEIFSNEMAKVDDSFFHR
LEESFLVEEDKKHERHPIFGNIVDEVAYHEKYPTIYHLRKKLVDSTDKAD
LRLIYLALAHMIKFRGHFLIEGDLNPDNSDVDKLFIQLVQTYNQLFEENP
INASGVDAKAILSARLSKSRRLENLIAQLPGEKKNGLFGNLIALSLGLTP
NFKSNFDLAEDAKLQLSKDTYDDDLDNLLAQIGDQYADLFLAAKNLSDAI
LLSDILRVNTEITKAPLSASMIKRYDEHHQDLTLLKALVRQQLPEKYKEI
FFDQSKNGYAGYIDGGASQEEFYKFIKPILEKMDGTEELLVKLNREDLLR
KQRTFDNGSIPHQIHLGELHAILRRQEDFYPFLKDNREKIEKILTFRIPY
YVGPLARGNSRFAWMTRKSEETITPWNFEEVVDKGASAQSFIERMTNFDK
NLPNEKVLPKHSLLYEYFTVYNELTKVKYVTEGMRKPAFLSGEQKKAIVD
LLFKTNRKVTVKQLKEDYFKKIECFDSVEISGVEDRFNASLGTYHDLLKI
IKDKDFLDNEENEDILEDIVLTLTLFEDREMIEERLKTYAHLFDDKVMKQ
LKRRRYTGWGRLSRKLINGIRDKQSGKTILDFLKSDGFANRNFMQLIHDD
SLTFKEDIQKAQVSGQGDSLHEHIANLAGSPAIKKGILQTVKVVDELVKV
MGRHKPENIVIEMARENQTTQKGQKNSRERMKRIEEGIKELGSSGSETPG
TSESATPESSGSEVEFSHEYWMRHALTLAKRARDEREVPVGAVLVLNNRV
IGEGWNRAIGLHDPTAHAEIMALRQGGLVMQNYRLIDATLYVTFEPCVMC
AGAMIHSRIGRVVFGVRNAKTGAAGSLMDVLHYPGMNHRVEITEGILADE
CAALLCYFFRMPRQGSQILKEHPVENTQLQNEKLYLYYLQNGRDMYVDQE
LDINRLSDYDVDHIVPQSFLKDDSIDNKVLTRSDKNRGKSDNVPSEEVVK
KMKNYWRQLLNAKLITQRKFDNLTKAERGGLSELDKAGFIKRQLVETRQI
TKHVAQILDSRMNTKYDENDKLIREVKVITLKSKLVSDFRKDFQFYKVRE
INNYHHAHDAYLNAVVGTALIKKYPKLESEFVYGDYKVYDVRKMIAKSEQ
EIGKATAKYFFYSNIMNFFKTEITLANGEIRKRPLIETNGETGEIVWDKG
RDFATVRKVLSMPQVNIVKKTEVQTGGFSKESILPKRNSDKLIARKKDWD
PKKYGGFDSPTVAYSVLVVAKVEKGKSKKLKSVKELLGITIMERSSFEKN
PIDFLEAKGYKEVKKDLIIKLPKYSLFELENGRKRMLASAGELQKGNELA
LPSKYVNFLYLASHYEKLKGSPEDNEQKQLFVEQHKHYLDEIIEQISEFS
KRVILADANLDKVLSAYNKHRDKPIREQAENIIHLFTLTNLGAPAAFKYF
DTTIDRKRYTSTKEVLDATLIHQSITGLYETRIDLSQLGGD
116.3 Cas9 TadAins C-term truncate2 790
MDKKYSIGLAIGTNSVGWAVITDEYKVPSKKFKVLGNTDRHSIKKNLIGA
LLFDSGETAEATRLKRTARRRYTRRKNRICYLQEIFSNEMAKVDDSFFHR
LEESFLVEEDKKHERHPIFGNIVDEVAYHEKYPTIYHLRKKLVDSTDKAD
LRLIYLALAHMIKFRGHFLIEGDLNPDNSDVDKLFIQLVQTYNQLFEENP
INASGVDAKAILSARLSKSRRLENLIAQLPGEKKNGLFGNLIALSLGLTP
NFKSNFDLAEDAKLQLSKDTYDDDLDNLLAQIGDQYADLFLAAKNLSDAI
LLSDILRVNTEITKAPLSASMIKRYDEHHQDLTLLKALVRQQLPEKYKEI
FFDQSKNGYAGYIDGGASQEEFYKFIKPILEKMDGTEELLVKLNREDLLR
KQRTFDNGSIPHQIHLGELHAILRRQEDFYPFLKDNREKIEKILTFRIPY
YVGPLARGNSRFAWMTRKSEETITPWNFEEVVDKGASAQSFIERMTNFDK
NLPNEKVLPKHSLLYEYFTVYNELTKVKYVTEGMRKPAFLSGEQKKAIVD
LLFKTNRKVTVKQLKEDYFKKIECFDSVEISGVEDRFNASLGTYHDLLKI
IKDKDFLDNEENEDILEDIVLTLTLFEDREMIEERLKTYAHLFDDKVMKQ
LKRRRYTGWGRLSRKLINGIRDKQSGKTILDFLKSDGFANRNFMQLIHDD
SLTFKEDIQKAQVSGQGDSLHEHIANLAGSPAIKKGILQTVKVVDELVKV
MGRHKPENIVIEMARENQTTQKGQKNSRERMKRIEEGIKEGSSGSETPGT
SESATPESSGSEVEFSHEYWMRHALTLAKRARDEREVPVGAVLVLNNRVI
GEGWNRAIGLHDPTAHAEIMALRQGGLVMQNYRLIDATLYVTFEPCVMCA
GAMIHSRIGRVVFGVRNAKTGAAGSLMDVLHYPGMNHRVEITEGILADEC
AALLCYFFRMPRQLGSQILKEHPVENTQLQNEKLYLYYLQNGRDMYVDQE
LDINRLSDYDVDHIVPQSFLKDDSIDNKVLTRSDKNRGKSDNVPSEEVVK
KMKNYWRQLLNAKLITQRKFDNLTKAERGGLSELDKAGFIKRQLVETRQI
TKHVAQILDSRMNTKYDENDKLIREVKVITLKSKLVSDFRKDFQFYKVRE
INNYHHAHDAYLNAVVGTALIKKYPKLESEFVYGDYKVYDVRKMIAKSEQ
EIGKATAKYFFYSNIMNFFKTEITLANGEIRKRPLIETNGETGEIVWDKG
RDFATVRKVLSMPQVNIVKKTEVQTGGFSKESILPKRNSDKLIARKKDWD
PKKYGGFDSPTVAYSVLVVAKVEKGKSKKLKSVKELLGITIMERSSFEKN
PIDFLEAKGYKEVKKDLIIKLPKYSLFELENGRKRMLASAGELQKGNELA
LPSKYVNFLYLASHYEKLKGSPEDNEQKQLFVEQHKHYLDEIIEQISEFS
KRVILADANLDKVLSAYNKHRDKPIREQAENIIHLFTLTNLGAPAAFKYF
DTTIDRKRYTSTKEVLDATLIHQSITGLYETRIDLSQLGGD
117 Cas9 delta 1017-1069
MDKKYSIGLAIGTNSVGWAVITDEYKVPSKKFKVLGNTDRHSIKKNLIGA
LLFDSGETAEATRLKRTARRRYTRRKNRICYLQEIFSNEMAKVDDSFFHR
LEESFLVEEDKKHERHPIFGNIVDEVAYHEKYPTIYHLRKKLVDSTDKAD
LRLIYLALAHMIKFRGHFLIEGDLNPDNSDVDKLFIQLVQTYNQLFEENP
INASGVDAKAILSARLSKSRRLENLIAQLPGEKKNGLFGNLIALSLGLTP
NFKSNFDLAEDAKLQLSKDTYDDDLDNLLAQIGDQYADLFLAAKNLSDAI
LLSDILRVNTEITKAPLSASMIKRYDEHHQDLTLLKALVRQQLPEKYKEI
FFDQSKNGYAGYIDGGASQEEFYKFIKPILEKMDGTEELLVKLNREDLLR
KQRTFDNGSIPHQIHLGELHAILRRQEDFYPFLKDNREKIEKILTFRIPY
YVGPLARGNSRFAWMTRKSEETITPWNFEEVVDKGASAQSFIERMTNFDK
NLPNEKVLPKHSLLYEYFTVYNELTKVKYVTEGMRKPAFLSGEQKKAIVD
LLFKTNRKVTVKQLKEDYFKKIECFDSVEISGVEDRFNASLGTYHDLLKI
IKDKDFLDNEENEDILEDIVLTLTLFEDREMIEERLKTYAHLFDDKVMKQ
LKRRRYTGWGRLSRKLINGIRDKQSGKTILDFLKSDGFANRNFMQLIHDD
SLTFKEDIQKAQVSGQGDSLHEHIANLAGSPAIKKGILQTVKVVDELVKV
MGRHKPENIVIEMARENQTTQKGQKNSRERMKRIEEGIKELGSQILKEHP
VENTQLQNEKLYLYYLQNGRDMYVDQELDINRLSDYDVDHIVPQSFLKDD
SIDNKVLTRSDKNRGKSDNVPSEEVVKKMKNYWRQLLNAKLITQRKFDNL
TKAERGGLSELDKAGFIKRQLVETRQITKHVAQILDSRMNTKYDENDKLI
REVKVITLKSKLVSDFRKDFQFYKVREINNYHHAHDAYLNAVVGTALIKK
YPKLESEFVYGDYKVYSSGSEVEFSHEYWMRHALTLAKRARDEREVPVGA
VLVLNNRVIGEGWNRAIGLHDPTAHAEIMALRQGGLVMQNYRLIDATLYV
TFEPCVMCAGAMIHSRIGRVVFGVRNAKTGAAGSLMDVLHYPGMNHRVEI
TEGILADECAALLCYFFRMPRQVFNAQKKAQSSTDGEIVWDKGRDFATVR
KVLSMPQVNIVKKTEVQTGGFSKESILPKRNSDKLIARKKDWDPKKYGGF
DSPTVAYSVLVVAKVEKGKSKKLKSVKELLGITIMERSSFEKNPIDFLEA
KGYKEVKKDLIIKLPKYSLFELENGRKRMLASAGELQKGNELALPSKYVN
FLYLASHYEKLKGSPEDNEQKQLFVEQHKHYLDEIIEQISEFSKRVILAD
ANLDKVLSAYNKHRDKPIREQAENIIHLFTLTNLGAPAAFKYFDTTIDRK
RYTSTKEVLDATLIHQSITGLYETRIDLSQLGGD
118 Cas9 TadA-CP116ins 1067
MDKKYSIGLAIGTNSVGWAVITDEYKVPSKKFKVLGNTDRHSIKKNLIGA
LLFDSGETAEATRLKRTARRRYTRRKNRICYLQEIFSNEMAKVDDSFFHR
LEESFLVEEDKKHERHPIFGNIVDEVAYHEKYPTIYHLRKKLVDSTDKAD
LRLIYLALAHMIKFRGHFLIEGDLNPDNSDVDKLFIQLVQTYNQLFEENP
INASGVDAKAILSARLSKSRRLENLIAQLPGEKKNGLFGNLIALSLGLTP
NFKSNFDLAEDAKLQLSKDTYDDDLDNLLAQIGDQYADLFLAAKNLSDAI
LLSDILRVNTEITKAPLSASMIKRYDEHHQDLTLLKALVRQQLPEKYKEI
FFDQSKNGYAGYIDGGASQEEFYKFIKPILEKMDGTEELLVKLNREDLLR
KQRTFDNGSIPHQIHLGELHAILRRQEDFYPFLKDNREKIEKILTFRIPY
YVGPLARGNSRFAWMTRKSEETITPWNFEEVVDKGASAQSFIERMTNFDK
NLPNEKVLPKHSLLYEYFTVYNELTKVKYVTEGMRKPAFLSGEQKKAIVD
LLFKTNRKVTVKQLKEDYFKKIECFDSVEISGVEDRFNASLGTYHDLLKI
IKDKDFLDNEENEDILEDIVLTLTLFEDREMIEERLKTYAHLFDDKVMKQ
LKRRRYTGWGRLSRKLINGIRDKQSGKTILDFLKSDGFANRNFMQLIHDD
SLTFKEDIQKAQVSGQGDSLHEHIANLAGSPAIKKGILQTVKVVDELVKV
MGRHKPENIVIEMARENQTTQKGQKNSRERMKRIEEGIKELGSQILKEHP
VENTQLQNEKLYLYYLQNGRDMYVDQELDINRLSDYDVDHIVPQSFLKDD
SIDNKVLTRSDKNRGKSDNVPSEEVVKKMKNYWRQLLNAKLITQRKFDNL
TKAERGGLSELDKAGFIKRQLVETRQITKHVAQILDSRMNTKYDENDKLI
REVKVITLKSKLVSDFRKDFQFYKVREINNYHHAHDAYLNAVVGTALIKK
YPKLESEFVYGDYKVYDVRKMIAKSEQEIGKATAKYFFYSNIMNFFKTEI
TLANGEIRKRPLIETNMNHRVEITEGILADECAALLCYFFRMPRQVFNAQ
KKAQSSTDGSSGSETPGTSESATPESSGSEVEFSHEYWMRHALTLAKRAR
DEREVPVGAVLVLNNRVIGEGWNRAIGLHDPTAHAEIMALRQGGLVMQNY
RLIDATLYVTFEPCVMCAGAMIHSRIGRVVFGVRNAKTGAAGSLMDVLHY
PGGETGEIVWDKGRDFATVRKVLSMPQVNIVKKTEVQTGGFSKESILPKR
NSDKLIARKKDWDPKKYGGFDSPTVAYSVLVVAKVEKGKSKKLKSVKELL
GITIMERSSFEKNPIDFLEAKGYKEVKKDLIIKLPKYSLFELENGRKRML
ASAGELQKGNELALPSKYVNFLYLASHYEKLKGSPEDNEQKQLFVEQHKH
YLDEIIEQISEFSKRVILADANLDKVLSAYNKHRDKPIREQAENIIHLFT
LTNLGAPAAFKYFDTTIDRKRYTSTKEVLDATLIHQSITGLYETRIDLSQ
LGGD
119 Cas9 TadAins 701
MDKKYSIGLAIGTNSVGWAVITDEYKVPSKKFKVLGNTDRHSIKKNLIGA
LLFDSGETAEATRLKRTARRRYTRRKNRICYLQEIFSNEMAKVDDSFFHR
LEESFLVEEDKKHERHPIFGNIVDEVAYHEKYPTIYHLRKKLVDSTDKAD
LRLIYLALAHMIKFRGHFLIEGDLNPDNSDVDKLFIQLVQTYNQLFEENP
INASGVDAKAILSARLSKSRRLENLIAQLPGEKKNGLFGNLIALSLGLTP
NFKSNFDLAEDAKLQLSKDTYDDDLDNLLAQIGDQYADLFLAAKNLSDAI
LLSDILRVNTEITKAPLSASMIKRYDEHHQDLTLLKALVRQQLPEKYKEI
FFDQSKNGYAGYIDGGASQEEFYKFIKPILEKMDGTEELLVKLNREDLLR
KQRTFDNGSIPHQIHLGELHAILRRQEDFYPFLKDNREKIEKILTFRIPY
YVGPLARGNSRFAWMTRKSEETITPWNFEEVVDKGASAQSFIERMTNFDK
NLPNEKVLPKHSLLYEYFTVYNELTKVKYVTEGMRKPAFLSGEQKKAIVD
LLFKTNRKVTVKQLKEDYFKKIECFDSVEISGVEDRFNASLGTYHDLLKI
IKDKDFLDNEENEDILEDIVLTLTLFEDREMIEERLKTYAHLFDDKVMKQ
LKRRRYTGWGRLSRKLINGIRDKQSGKTILDFLKSDGFANRNFMQLIHDD
SGSSGSETPGTSESATPESSGSEVEFSHEYWMRHALTLAKRARDEREVPV
GAVLVLNNRVIGEGWNRAIGLHDPTAHAEIMALRQGGLVMQNYRLIDATL
YVTFEPCVMCAGAMIHSRIGRVVFGVRNAKTGAAGSLMDVLHYPGMNHRV
EITEGILADECAALLCYFFRMPRQVFNAQKKAQSSTDLTFKEDIQKAQVS
GQGDSLHEHIANLAGSPAIKKGILQTVKVVDELVKVMGRHKPENIVIEMA
RENQTTQKGQKNSRERMKRIEEGIKELGSQILKEHPVENTQLQNEKLYLY
YLQNGRDMYVDQELDINRLSDYDVDHIVPQSFLKDDSIDNKVLTRSDKNR
GKSDNVPSEEVVKKMKNYWRQLLNAKLITQRKFDNLTKAERGGLSELDKA
GFIKRQLVETRQITKHVAQILDSRMNTKYDENDKLIREVKVITLKSKLVS
DFRKDFQFYKVREINNYHHAHDAYLNAVVGTALIKKYPKLESEFVYGDYK
VYDVRKMIAKSEQEIGKATAKYFFYSNIMNFFKTEITLANGEIRKRPLIE
TNGETGEIVWDKGRDFATVRKVLSMPQVNIVKKTEVQTGGFSKESILPKR
NSDKLIARKKDWDPKKYGGFDSPTVAYSVLVVAKVEKGKSKKLKSVKELL
GITIMERSSFEKNPIDFLEAKGYKEVKKDLIIKLPKYSLFELENGRKRML
ASAGELQKGNELALPSKYVNFLYLASHYEKLKGSPEDNEQKQLFVEQHKH
YLDEIIEQISEFSKRVILADANLDKVLSAYNKHRDKPIREQAENIIHLFT
LTNLGAPAAFKYFDTTIDRKRYTSTKEVLDATLIHQSITGLYETRIDLSQ
LGGD
120 Cas9 TadACP136ins 1248
MDKKYSIGLAIGTNSVGWAVITDEYKVPSKKFKVLGNTDRHSIKKNLIGA
LLFDSGETAEATRLKRTARRRYTRRKNRICYLQEIFSNEMAKVDDSFFHR
LEESFLVEEDKKHERHPIFGNIVDEVAYHEKYPTIYHLRKKLVDSTDKAD
LRLIYLALAHMIKFRGHFLIEGDLNPDNSDVDKLFIQLVQTYNQLFEENP
INASGVDAKAILSARLSKSRRLENLIAQLPGEKKNGLFGNLIALSLGLTP
NFKSNFDLAEDAKLQLSKDTYDDDLDNLLAQIGDQYADLFLAAKNLSDAI
LLSDILRVNTEITKAPLSASMIKRYDEHHQDLTLLKALVRQQLPEKYKEI
FFDQSKNGYAGYIDGGASQEEFYKFIKPILEKMDGTEELLVKLNREDLLR
KQRTFDNGSIPHQIHLGELHAILRRQEDFYPFLKDNREKIEKILTFRIPY
YVGPLARGNSRFAWMTRKSEETITPWNFEEVVDKGASAQSFIERMTNFDK
NLPNEKVLPKHSLLYEYFTVYNELTKVKYVTEGMRKPAFLSGEQKKAIVD
LLFKTNRKVTVKQLKEDYFKKIECFDSVEISGVEDRFNASLGTYHDLLKI
IKDKDFLDNEENEDILEDIVLTLTLFEDREMIEERLKTYAHLFDDKVMKQ
LKRRRYTGWGRLSRKLINGIRDKQSGKTILDFLKSDGFANRNFMQLIHDD
SLTFKEDIQKAQVSGQGDSLHEHIANLAGSPAIKKGILQTVKVVDELVKV
MGRHKPENIVIEMARENQTTQKGQKNSRERMKRIEEGIKELGSQILKEHP
VENTQLQNEKLYLYYLQNGRDMYVDQELDINRLSDYDVDHIVPQSFLKDD
SIDNKVLTRSDKNRGKSDNVPSEEVVKKMKNYWRQLLNAKLITQRKFDNL
TKAERGGLSELDKAGFIKRQLVETRQITKHVAQILDSRMNTKYDENDKLI
REVKVITLKSKLVSDFRKDFQFYKVREINNYHHAHDAYLNAVVGTALIKK
YPKLESEFVYGDYKVYDVRKMIAKSEQEIGKATAKYFFYSNIMNFFKTEI
TLANGEIRKRPLIETNGETGEIVWDKGRDFATVRKVLSMPQVNIVKKTEV
QTGGFSKESILPKRNSDKLIARKKDWDPKKYGGFDSPTVAYSVLVVAKVE
KGKSKKLKSVKELLGITIMERSSFEKNPIDFLEAKGYKEVKKDLIIKLPK
YSLFELENGRKRMLASAGELQKGNELALPSKYVNFLYLASHYEKLKGSMN
HRVEITEGILADECAALLCYFFRMPRQVFNAQKKAQSSTDGSSGSETPGT
SESATPESSGSEVEFSHEYWMRHALTLAKRARDEREVPVGAVLVLNNRVI
GEGWNRAIGLHDPTAHAEIMALRQGGLVMQNYRLIDATLYVTFEPCVMCA
GAMIHSRIGRVVFGVRNAKTGAAGSLMDVLHYPGPEDNEQKQLFVEQHKH
YLDEIIEQISEFSKRVILADANLDKVLSAYNKHRDKPIREQAENIIHLFT
LTNLGAPAAFKYFDTTIDRKRYTSTKEVLDATLIHQSITGLYETRIDLSQ
LGGD
121 Cas9 TadACP136ins 1052
MDKKYSIGLAIGTNSVGWAVITDEYKVPSKKFKVLGNTDRHSIKKNLIGA
LLFDSGETAEATRLKRTARRRYTRRKNRICYLQEIFSNEMAKVDDSFFHR
LEESFLVEEDKKHERHPIFGNIVDEVAYHEKYPTIYHLRKKLVDSTDKAD
LRLIYLALAHMIKFRGHFLIEGDLNPDNSDVDKLFIQLVQTYNQLFEENP
INASGVDAKAILSARLSKSRRLENLIAQLPGEKKNGLFGNLIALSLGLTP
NFKSNFDLAEDAKLQLSKDTYDDDLDNLLAQIGDQYADLFLAAKNLSDAI
LLSDILRVNTEITKAPLSASMIKRYDEHHQDLTLLKALVRQQLPEKYKEI
FFDQSKNGYAGYIDGGASQEEFYKFIKPILEKMDGTEELLVKLNREDLLR
KQRTFDNGSIPHQIHLGELHAILRRQEDFYPFLKDNREKIEKILTFRIPY
YVGPLARGNSRFAWMTRKSEETITPWNFEEVVDKGASAQSFIERMTNFDK
NLPNEKVLPKHSLLYEYFTVYNELTKVKYVTEGMRKPAFLSGEQKKAIVD
LLFKTNRKVTVKQLKEDYFKKIECFDSVEISGVEDRFNASLGTYHDLLKI
IKDKDFLDNEENEDILEDIVLTLTLFEDREMIEERLKTYAHLFDDKVMKQ
LKRRRYTGWGRLSRKLINGIRDKQSGKTILDFLKSDGFANRNFMQLIHDD
SLTFKEDIQKAQVSGQGDSLHEHIANLAGSPAIKKGILQTVKVVDELVKV
MGRHKPENIVIEMARENQTTQKGQKNSRERMKRIEEGIKELGSQILKEHP
VENTQLQNEKLYLYYLQNGRDMYVDQELDINRLSDYDVDHIVPQSFLKDD
SIDNKVLTRSDKNRGKSDNVPSEEVVKKMKNYWRQLLNAKLITQRKFDNL
TKAERGGLSELDKAGFIKRQLVETRQITKHVAQILDSRMNTKYDENDKLI
REVKVITLKSKLVSDFRKDFQFYKVREINNYHHAHDAYLNAVVGTALIKK
YPKLESEFVYGDYKVYDVRKMIAKSEQEIGKATAKYFFYSNIMNFFKTEI
TLAMNHRVEITEGILADECAALLCYFFRMPRQVFNAQKKAQSSTDGSSGS
ETPGTSESATPESSGSEVEFSHEYWMRHALTLAKRARDEREVPVGAVLVL
NNRVIGEGWNRAIGLHDPTAHAEIMALRQGGLVMQNYRLIDATLYVTFEP
CVMCAGAMIHSRIGRVVFGVRNAKTGAAGSLMDVLHYPGNGEIRKRPLIE
TNGETGEIVWDKGRDFATVRKVLSMPQVNIVKKTEVQTGGFSKESILPKR
NSDKLIARKKDWDPKKYGGFDSPTVAYSVLVVAKVEKGKSKKLKSVKELL
GITIMERSSFEKNPIDFLEAKGYKEVKKDLIIKLPKYSLFELENGRKRML
ASAGELQKGNELALPSKYVNFLYLASHYEKLKGSPEDNEQKQLFVEQHKH
YLDEIIEQISEFSKRVILADANLDKVLSAYNKHRDKPIREQAENIIHLFT
LTNLGAPAAFKYFDTTIDRKRYTSTKEVLDATLIHQSITGLYETRIDLSQ
LGGD
122 Cas9 TadACP136ins 1041
MDKKYSIGLAIGTNSVGWAVITDEYKVPSKKFKVLGNTDRHSIKKNLIGA
LLFDSGETAEATRLKRTARRRYTRRKNRICYLQEIFSNEMAKVDDSFFHR
LEESFLVEEDKKHERHPIFGNIVDEVAYHEKYPTIYHLRKKLVDSTDKAD
LRLIYLALAHMIKFRGHFLIEGDLNPDNSDVDKLFIQLVQTYNQLFEENP
INASGVDAKAILSARLSKSRRLENLIAQLPGEKKNGLFGNLIALSLGLTP
NFKSNFDLAEDAKLQLSKDTYDDDLDNLLAQIGDQYADLFLAAKNLSDAI
LLSDILRVNTEITKAPLSASMIKRYDEHHQDLTLLKALVRQQLPEKYKEI
FFDQSKNGYAGYIDGGASQEEFYKFIKPILEKMDGTEELLVKLNREDLLR
KQRTFDNGSIPHQIHLGELHAILRRQEDFYPFLKDNREKIEKILTFRIPY
YVGPLARGNSRFAWMTRKSEETITPWNFEEVVDKGASAQSFIERMTNFDK
NLPNEKVLPKHSLLYEYFTVYNELTKVKYVTEGMRKPAFLSGEQKKAIVD
LLFKTNRKVTVKQLKEDYFKKIECFDSVEISGVEDRFNASLGTYHDLLKI
IKDKDFLDNEENEDILEDIVLTLTLFEDREMIEERLKTYAHLFDDKVMKQ
LKRRRYTGWGRLSRKLINGIRDKQSGKTILDFLKSDGFANRNFMQLIHDD
SLTFKEDIQKAQVSGQGDSLHEHIANLAGSPAIKKGILQTVKVVDELVKV
MGRHKPENIVIEMARENQTTQKGQKNSRERMKRIEEGIKELGSQILKEHP
VENTQLQNEKLYLYYLQNGRDMYVDQELDINRLSDYDVDHIVPQSFLKDD
SIDNKVLTRSDKNRGKSDNVPSEEVVKKMKNYWRQLLNAKLITQRKFDNL
TKAERGGLSELDKAGFIKRQLVETRQITKHVAQILDSRMNTKYDENDKLI
REVKVITLKSKLVSDFRKDFQFYKVREINNYHHAHDAYLNAVVGTALIKK
YPKLESEFVYGDYKVYDVRKMIAKSEQEIGKATAKYFFYSMNHRVEITEG
ILADECAALLCYFFRMPRQVFNAQKKAQSSTDGSSGSETPGTSESATPES
SGSEVEFSHEYWMRHALTLAKRARDEREVPVGAVLVLNNRVIGEGWNRAI
GLHDPTAHAEIMALRQGGLVMQNYRLIDATLYVTFEPCVMCAGAMIHSRI
GRVVFGVRNAKTGAAGSLMDVLHYPGNIMNFFKTEITLANGEIRKRPLIE
TNGETGEIVWDKGRDFATVRKVLSMPQVNIVKKTEVQTGGFSKESILPKR
NSDKLIARKKDWDPKKYGGFDSPTVAYSVLVVAKVEKGKSKKLKSVKELL
GITIMERSSFEKNPIDFLEAKGYKEVKKDLIIKLPKYSLFELENGRKRML
ASAGELQKGNELALPSKYVNFLYLASHYEKLKGSPEDNEQKQLFVEQHKH
YLDEIIEQISEFSKRVILADANLDKVLSAYNKHRDKPIREQAENIIHLFT
LTNLGAPAAFKYFDTTIDRKRYTSTKEVLDATLIHQSITGLYETRIDLSQ
LGGD
123 Cas9 TadACP139ins 1299
MDKKYSIGLAIGTNSVGWAVITDEYKVPSKKFKVLGNTDRHSIKKNLIGA
LLFDSGETAEATRLKRTARRRYTRRKNRICYLQEIFSNEMAKVDDSFFHR
LEESFLVEEDKKHERHPIFGNIVDEVAYHEKYPTIYHLRKKLVDSTDKAD
LRLIYLALAHMIKFRGHFLIEGDLNPDNSDVDKLFIQLVQTYNQLFEENP
INASGVDAKAILSARLSKSRRLENLIAQLPGEKKNGLFGNLIALSLGLTP
NFKSNFDLAEDAKLQLSKDTYDDDLDNLLAQIGDQYADLFLAAKNLSDAI
LLSDILRVNTEITKAPLSASMIKRYDEHHQDLTLLKALVRQQLPEKYKEI
FFDQSKNGYAGYIDGGASQEEFYKFIKPILEKMDGTEELLVKLNREDLLR
KQRTFDNGSIPHQIHLGELHAILRRQEDFYPFLKDNREKIEKILTFRIPY
YVGPLARGNSRFAWMTRKSEETITPWNFEEVVDKGASAQSFIERMTNFDK
NLPNEKVLPKHSLLYEYFTVYNELTKVKYVTEGMRKPAFLSGEQKKAIVD
LLFKTNRKVTVKQLKEDYFKKIECFDSVEISGVEDRFNASLGTYHDLLKI
IKDKDFLDNEENEDILEDIVLTLTLFEDREMIEERLKTYAHLFDDKVMKQ
LKRRRYTGWGRLSRKLINGIRDKQSGKTILDFLKSDGFANRNFMQLIHDD
SLTFKEDIQKAQVSGQGDSLHEHIANLAGSPAIKKGILQTVKVVDELVKV
MGRHKPENIVIEMARENQTTQKGQKNSRERMKRIEEGIKELGSQILKEHP
VENTQLQNEKLYLYYLQNGRDMYVDQELDINRLSDYDVDHIVPQSFLKDD
SIDNKVLTRSDKNRGKSDNVPSEEVVKKMKNYWRQLLNAKLITQRKFDNL
TKAERGGLSELDKAGFIKRQLVETRQITKHVAQILDSRMNTKYDENDKLI
REVKVITLKSKLVSDFRKDFQFYKVREINNYHHAHDAYLNAVVGTALIKK
YPKLESEFVYGDYKVYDVRKMIAKSEQEIGKATAKYFFYSNIMNFFKTEI
TLANGEIRKRPLIETNGETGEIVWDKGRDFATVRKVLSMPQVNIVKKTEV
QTGGFSKESILPKRNSDKLIARKKDWDPKKYGGFDSPTVAYSVLVVAKVE
KGKSKKLKSVKELLGITIMERSSFEKNPIDFLEAKGYKEVKKDLIIKLPK
YSLFELENGRKRMLASAGELQKGNELALPSKYVNFLYLASHYEKLKGSPE
DNEQKQLFVEQHKHYLDEIIEQISEFSKRVILADANLDKVLSAYNKHRMN
HRVEITEGILADECAALLCYFFRMPRQVFNAQKKAQSSTDGSSGSETPGT
SESATPESSGSEVEFSHEYWMRHALTLAKRARDEREVPVGAVLVLNNRVI
GEGWNRAIGLHDPTAHAEIMALRQGGLVMQNYRLIDATLYVTFEPCVMCA
GAMIHSRIGRVVFGVRNAKTGAAGSLMDVLHYPGDKPIREQAENIIHLFT
LTNLGAPAAFKYFDTTIDRKRYTSTKEVLDATLIHQSITGLYETRIDLSQ
LGGD
124 Cas9 delta 792-872 TadAins
MDKKYSIGLAIGTNSVGWAVITDEYKVPSKKFKVLGNTDRHSIKKNLIGA
LLFDSGETAEATRLKRTARRRYTRRKNRICYLQEIFSNEMAKVDDSFFHR
LEESFLVEEDKKHERHPIFGNIVDEVAYHEKYPTIYHLRKKLVDSTDKAD
LRLIYLALAHMIKFRGHFLIEGDLNPDNSDVDKLFIQLVQTYNQLFEENP
INASGVDAKAILSARLSKSRRLENLIAQLPGEKKNGLFGNLIALSLGLTP
NFKSNFDLAEDAKLQLSKDTYDDDLDNLLAQIGDQYADLFLAAKNLSDAI
LLSDILRVNTEITKAPLSASMIKRYDEHHQDLTLLKALVRQQLPEKYKEI
FFDQSKNGYAGYIDGGASQEEFYKFIKPILEKMDGTEELLVKLNREDLLR
KQRTFDNGSIPHQIHLGELHAILRRQEDFYPFLKDNREKIEKILTFRIPY
YVGPLARGNSRFAWMTRKSEETITPWNFEEVVDKGASAQSFIERMTNFDK
NLPNEKVLPKHSLLYEYFTVYNELTKVKYVTEGMRKPAFLSGEQKKAIVD
LLFKTNRKVTVKQLKEDYFKKIECFDSVEISGVEDRFNASLGTYHDLLKI
IKDKDFLDNEENEDILEDIVLTLTLFEDREMIEERLKTYAHLFDDKVMKQ
LKRRRYTGWGRLSRKLINGIRDKQSGKTILDFLKSDGFANRNFMQLIHDD
SLTFKEDIQKAQVSGQGDSLHEHIANLAGSPAIKKGILQTVKVVDELVKV
MGRHKPENIVIEMARENQTTQKGQKNSRERMKRIEEGIKELGSEVEFSHE
YWMRHALTLAKRARDEREVPVGAVLVLNNRVIGEGWNRAIGLHDPTAHAE
IMALRQGGLVMQNYRLIDATLYVTFEPCVMCAGAMIHSRIGRVVFGVRNA
KTGAAGSLMDVLHYPGMNHRVEITEGILADECAALLCYFFRMPRQVFNAQ
KKAQSSTDEEVVKKMKNYWRQLLNAKLITQRKFDNLTKAERGGLSELDKA
GFIKRQLVETRQITKHVAQILDSRMNTKYDENDKLIREVKVITLKSKLVS
DFRKDFQFYKVREINNYHHAHDAYLNAVVGTALIKKYPKLESEFVYGDYK
VYDVRKMIAKSEQEIGKATAKYFFYSNIMNFFKTEITLANGEIRKRPLIE
TNGETGEIVWDKGRDFATVRKVLSMPQVNIVKKTEVQTGGFSKESILPKR
NSDKLIARKKDWDPKKYGGFDSPTVAYSVLVVAKVEKGKSKKLKSVKELL
GITIMERSSFEKNPIDFLEAKGYKEVKKDLIIKLPKYSLFELENGRKRML
ASAGELQKGNELALPSKYVNFLYLASHYEKLKGSPEDNEQKQLFVEQHKH
YLDEIIEQISEFSKRVILADANLDKVLSAYNKHRDKPIREQAENIIHLFT
LTNLGAPAAFKYFDTTIDRKRYTSTKEVLDATLIHQSITGLYETRIDLSQ
LGGD
125 Cas9 delta 792-906 TadAins
MDKKYSIGLAIGTNSVGWAVITDEYKVPSKKFKVLGNTDRHSIKKNLIGA
LLFDSGETAEATRLKRTARRRYTRRKNRICYLQEIFSNEMAKVDDSFFHR
LEESFLVEEDKKHERHPIFGNIVDEVAYHEKYPTIYHLRKKLVDSTDKAD
LRLIYLALAHMIKFRGHFLIEGDLNPDNSDVDKLFIQLVQTYNQLFEENP
INASGVDAKAILSARLSKSRRLENLIAQLPGEKKNGLFGNLIALSLGLTP
NFKSNFDLAEDAKLQLSKDTYDDDLDNLLAQIGDQYADLFLAAKNLSDAI
LLSDILRVNTEITKAPLSASMIKRYDEHHQDLTLLKALVRQQLPEKYKEI
FFDQSKNGYAGYIDGGASQEEFYKFIKPILEKMDGTEELLVKLNREDLLR
KQRTFDNGSIPHQIHLGELHAILRRQEDFYPFLKDNREKIEKILTFRIPY
YVGPLARGNSRFAWMTRKSEETITPWNFEEVVDKGASAQSFIERMTNFDK
NLPNEKVLPKHSLLYEYFTVYNELTKVKYVTEGMRKPAFLSGEQKKAIVD
LLFKTNRKVTVKQLKEDYFKKIECFDSVEISGVEDRFNASLGTYHDLLKI
IKDKDFLDNEENEDILEDIVLTLTLFEDREMIEERLKTYAHLFDDKVMKQ
LKRRRYTGWGRLSRKLINGIRDKQSGKTILDFLKSDGFANRNFMQLIHDD
SLTFKEDIQKAQVSGQGDSLHEHIANLAGSPAIKKGILQTVKVVDELVKV
MGRHKPENIVIEMARENQTTQKGQKNSRERMKRIEEGIKELGSEVEFSHE
YWMRHALTLAKRARDEREVPVGAVLVLNNRVIGEGWNRAIGLHDPTAHAE
IMALRQGGLVMQNYRLIDATLYVTFEPCVMCAGAMIHSRIGRVVFGVRNA
KTGAAGSLMDVLHYPGMNHRVEITEGILADECAALLCYFFRMPRQVFNAQ
KKAQSSTDGLSELDKAGFIKRQLVETRQITKHVAQILDSRMNTKYDENDK
LIREVKVITLKSKLVSDFRKDFQFYKVREINNYHHAHDAYLNAVVGTALI
KKYPKLESEFVYGDYKVYDVRKMIAKSEQEIGKATAKYFFYSNIMNFFKT
EITLANGEIRKRPLIETNGETGEIVWDKGRDFATVRKVLSMPQVNIVKKT
EVQTGGFSKESILPKRNSDKLIARKKDWDPKKYGGFDSPTVAYSVLVVAK
VEKGKSKKLKSVKELLGITIMERSSFEKNPIDFLEAKGYKEVKKDLIIKL
PKYSLFELENGRKRMLASAGELQKGNELALPSKYVNFLYLASHYEKLKGS
PEDNEQKQLFVEQHKHYLDEIIEQISEFSKRVILADANLDKVLSAYNKHR
DKPIREQAENIIHLFTLTNLGAPAAFKYFDTTIDRKRYTSTKEVLDATLI
HQSITGLYETRIDLSQLGGD
126 TadA CP65ins 1003
MDKKYSIGLAIGTNSVGWAVITDEYKVPSKKFKVLGNTDRHSIKKNLIGA
LLFDSGETAEATRLKRTARRRYTRRKNRICYLQEIFSNEMAKVDDSFFHR
LEESFLVEEDKKHERHPIFGNIVDEVAYHEKYPTIYHLRKKLVDSTDKAD
LRLIYLALAHMIKFRGHFLIEGDLNPDNSDVDKLFIQLVQTYNQLFEENP
INASGVDAKAILSARLSKSRRLENLIAQLPGEKKNGLFGNLIALSLGLTP
NFKSNFDLAEDAKLQLSKDTYDDDLDNLLAQIGDQYADLFLAAKNLSDAI
LLSDILRVNTEITKAPLSASMIKRYDEHHQDLTLLKALVRQQLPEKYKEI
FFDQSKNGYAGYIDGGASQEEFYKFIKPILEKMDGTEELLVKLNREDLLR
KQRTFDNGSIPHQIHLGELHAILRRQEDFYPFLKDNREKIEKILTFRIPY
YVGPLARGNSRFAWMTRKSEETITPWNFEEVVDKGASAQSFIERMTNFDK
NLPNEKVLPKHSLLYEYFTVYNELTKVKYVTEGMRKPAFLSGEQKKAIVD
LLFKTNRKVTVKQLKEDYFKKIECFDSVEISGVEDRFNASLGTYHDLLKI
IKDKDFLDNEENEDILEDIVLTLTLFEDREMIEERLKTYAHLFDDKVMKQ
LKRRRYTGWGRLSRKLINGIRDKQSGKTILDFLKSDGFANRNFMQLIHDD
SLTFKEDIQKAQVSGQGDSLHEHIANLAGSPAIKKGILQTVKVVDELVKV
MGRHKPENIVIEMARENQTTQKGQKNSRERMKRIEEGIKELGSQILKEHP
VENTQLQNEKLYLYYLQNGRDMYVDQELDINRLSDYDVDHIVPQSFLKDD
SIDNKVLTRSDKNRGKSDNVPSEEVVKKMKNYWRQLLNAKLITQRKFDNL
TKAERGGLSELDKAGFIKRQLVETRQITKHVAQILDSRMNTKYDENDKLI
REVKVITLKSKLVSDFRKDFQFYKVREINNYHHAHDAYLNAVVGTALIKK
YPKTAHAEIMALRQGGLVMQNYRLIDATLYVTFEPCVMCAGAMIHSRIGR
VVFGVRNAKTGAAGSLMDVLHYPGMNHRVEITEGILADECAALLCYFFRM
PRQVFNAQKKAQSSTDGSSGSETPGTSESATPESSGSEVEFSHEYWMRHA
LTLAKRARDEREVPVGAVLVLNNRVIGEGWNRAIGLHDPLESEFVYGDYK
VYDVRKMIAKSEQEIGKATAKYFFYSNIMNFFKTEITLANGEIRKRPLIE
TNGETGEIVWDKGRDFATVRKVLSMPQVNIVKKTEVQTGGFSKESILPKR
NSDKLIARKKDWDPKKYGGFDSPTVAYSVLVVAKVEKGKSKKLKSVKELL
GITIMERSSFEKNPIDFLEAKGYKEVKKDLIIKLPKYSLFELENGRKRML
ASAGELQKGNELALPSKYVNFLYLASHYEKLKGSPEDNEQKQLFVEQHKH
YLDEIIEQISEFSKRVILADANLDKVLSAYNKHRDKPIREQAENIIHLFT
LTNLGAPAAFKYFDTTIDRKRYTSTKEVLDATLIHQSITGLYETRIDLSQ
LGGD
127 TadA CP65ins 1016
MDKKYSIGLAIGTNSVGWAVITDEYKVPSKKFKVLGNTDRHSIKKNLIGA
LLFDSGETAEATRLKRTARRRYTRRKNRICYLQEIFSNEMAKVDDSFFHR
LEESFLVEEDKKHERHPIFGNIVDEVAYHEKYPTIYHLRKKLVDSTDKAD
LRLIYLALAHMIKFRGHFLIEGDLNPDNSDVDKLFIQLVQTYNQLFEENP
INASGVDAKAILSARLSKSRRLENLIAQLPGEKKNGLFGNLIALSLGLTP
NFKSNFDLAEDAKLQLSKDTYDDDLDNLLAQIGDQYADLFLAAKNLSDAI
LLSDILRVNTEITKAPLSASMIKRYDEHHQDLTLLKALVRQQLPEKYKEI
FFDQSKNGYAGYIDGGASQEEFYKFIKPILEKMDGTEELLVKLNREDLLR
KQRTFDNGSIPHQIHLGELHAILRRQEDFYPFLKDNREKIEKILTFRIPY
YVGPLARGNSRFAWMTRKSEETITPWNFEEVVDKGASAQSFIERMTNFDK
NLPNEKVLPKHSLLYEYFTVYNELTKVKYVTEGMRKPAFLSGEQKKAIVD
LLFKTNRKVTVKQLKEDYFKKIECFDSVEISGVEDRFNASLGTYHDLLKI
IKDKDFLDNEENEDILEDIVLTLTLFEDREMIEERLKTYAHLFDDKVMKQ
LKRRRYTGWGRLSRKLINGIRDKQSGKTILDFLKSDGFANRNFMQLIHDD
SLTFKEDIQKAQVSGQGDSLHEHIANLAGSPAIKKGILQTVKVVDELVKV
MGRHKPENIVIEMARENQTTQKGQKNSRERMKRIEEGIKELGSQILKEHP
VENTQLQNEKLYLYYLQNGRDMYVDQELDINRLSDYDVDHIVPQSFLKDD
SIDNKVLTRSDKNRGKSDNVPSEEVVKKMKNYWRQLLNAKLITQRKFDNL
TKAERGGLSELDKAGFIKRQLVETRQITKHVAQILDSRMNTKYDENDKLI
REVKVITLKSKLVSDFRKDFQFYKVREINNYHHAHDAYLNAVVGTALIKK
YPKLESEFVYGDYKVTAHAEIMALRQGGLVMQNYRLIDATLYVTFEPCVM
CAGAMIHSRIGRVVFGVRNAKTGAAGSLMDVLHYPGMNHRVEITEGILAD
ECAALLCYFFRMPRQVFNAQKKAQSSTDGSSGSETPGTSESATPESSGSE
VEFSHEYWMRHALTLAKRARDEREVPVGAVLVLNNRVIGEGWNRAIGLHD
PYDVRKMIAKSEQEIGKATAKYFFYSNIMNFFKTEITLANGEIRKRPLIE
TNGETGEIVWDKGRDFATVRKVLSMPQVNIVKKTEVQTGGFSKESILPKR
NSDKLIARKKDWDPKKYGGFDSPTVAYSVLVVAKVEKGKSKKLKSVKELL
GITIMERSSFEKNPIDFLEAKGYKEVKKDLIIKLPKYSLFELENGRKRML
ASAGELQKGNELALPSKYVNFLYLASHYEKLKGSPEDNEQKQLFVEQHKH
YLDEIIEQISEFSKRVILADANLDKVLSAYNKHRDKPIREQAENIIHLFT
LTNLGAPAAFKYFDTTIDRKRYTSTKEVLDATLIHQSITGLYETRIDLSQ
LGGD
128 TadA CP65ins 1022
MDKKYSIGLAIGTNSVGWAVITDEYKVPSKKFKVLGNTDRHSIKKNLIGA
LLFDSGETAEATRLKRTARRRYTRRKNRICYLQEIFSNEMAKVDDSFFHR
LEESFLVEEDKKHERHPIFGNIVDEVAYHEKYPTIYHLRKKLVDSTDKAD
LRLIYLALAHMIKFRGHFLIEGDLNPDNSDVDKLFIQLVQTYNQLFEENP
INASGVDAKAILSARLSKSRRLENLIAQLPGEKKNGLFGNLIALSLGLTP
NFKSNFDLAEDAKLQLSKDTYDDDLDNLLAQIGDQYADLFLAAKNLSDAI
LLSDILRVNTEITKAPLSASMIKRYDEHHQDLTLLKALVRQQLPEKYKEI
FFDQSKNGYAGYIDGGASQEEFYKFIKPILEKMDGTEELLVKLNREDLLR
KQRTFDNGSIPHQIHLGELHAILRRQEDFYPFLKDNREKIEKILTFRIPY
YVGPLARGNSRFAWMTRKSEETITPWNFEEVVDKGASAQSFIERMTNFDK
NLPNEKVLPKHSLLYEYFTVYNELTKVKYVTEGMRKPAFLSGEQKKAIVD
LLFKTNRKVTVKQLKEDYFKKIECFDSVEISGVEDRFNASLGTYHDLLKI
IKDKDFLDNEENEDILEDIVLTLTLFEDREMIEERLKTYAHLFDDKVMKQ
LKRRRYTGWGRLSRKLINGIRDKQSGKTILDFLKSDGFANRNFMQLIHDD
SLTFKEDIQKAQVSGQGDSLHEHIANLAGSPAIKKGILQTVKVVDELVKV
MGRHKPENIVIEMARENQTTQKGQKNSRERMKRIEEGIKELGSQILKEHP
VENTQLQNEKLYLYYLQNGRDMYVDQELDINRLSDYDVDHIVPQSFLKDD
SIDNKVLTRSDKNRGKSDNVPSEEVVKKMKNYWRQLLNAKLITQRKFDNL
TKAERGGLSELDKAGFIKRQLVETRQITKHVAQILDSRMNTKYDENDKLI
REVKVITLKSKLVSDFRKDFQFYKVREINNYHHAHDAYLNAVVGTALIKK
YPKLESEFVYGDYKVYDVRKMITAHAEIMALRQGGLVMQNYRLIDATLYV
TFEPCVMCAGAMIHSRIGRVVFGVRNAKTGAAGSLMDVLHYPGMNHRVEI
TEGILADECAALLCYFFRMPRQVFNAQKKAQSSTDGSSGSETPGTSESAT
PESSGSEVEFSHEYWMRHALTLAKRARDEREVPVGAVLVLNNRVIGEGWN
RAIGLHDPAKSEQEIGKATAKYFFYSNIMNFFKTEITLANGEIRKRPLIE
TNGETGEIVWDKGRDFATVRKVLSMPQVNIVKKTEVQTGGFSKESILPKR
NSDKLIARKKDWDPKKYGGFDSPTVAYSVLVVAKVEKGKSKKLKSVKELL
GITIMERSSFEKNPIDFLEAKGYKEVKKDLIIKLPKYSLFELENGRKRML
ASAGELQKGNELALPSKYVNFLYLASHYEKLKGSPEDNEQKQLFVEQHKH
YLDEIIEQISEFSKRVILADANLDKVLSAYNKHRDKPIREQAENIIHLFT
LTNLGAPAAFKYFDTTIDRKRYTSTKEVLDATLIHQSITGLYETRIDLSQ
LGGD
129 TadA CP65ins 1029
MDKKYSIGLAIGTNSVGWAVITDEYKVPSKKFKVLGNTDRHSIKKNLIGA
LLFDSGETAEATRLKRTARRRYTRRKNRICYLQEIFSNEMAKVDDSFFHR
LEESFLVEEDKKHERHPIFGNIVDEVAYHEKYPTIYHLRKKLVDSTDKAD
LRLIYLALAHMIKFRGHFLIEGDLNPDNSDVDKLFIQLVQTYNQLFEENP
INASGVDAKAILSARLSKSRRLENLIAQLPGEKKNGLFGNLIALSLGLTP
NFKSNFDLAEDAKLQLSKDTYDDDLDNLLAQIGDQYADLFLAAKNLSDAI
LLSDILRVNTEITKAPLSASMIKRYDEHHQDLTLLKALVRQQLPEKYKEI
FFDQSKNGYAGYIDGGASQEEFYKFIKPILEKMDGTEELLVKLNREDLLR
KQRTFDNGSIPHQIHLGELHAILRRQEDFYPFLKDNREKIEKILTFRIPY
YVGPLARGNSRFAWMTRKSEETITPWNFEEVVDKGASAQSFIERMTNFDK
NLPNEKVLPKHSLLYEYFTVYNELTKVKYVTEGMRKPAFLSGEQKKAIVD
LLFKTNRKVTVKQLKEDYFKKIECFDSVEISGVEDRFNASLGTYHDLLKI
IKDKDFLDNEENEDILEDIVLTLTLFEDREMIEERLKTYAHLFDDKVMKQ
LKRRRYTGWGRLSRKLINGIRDKQSGKTILDFLKSDGFANRNFMQLIHDD
SLTFKEDIQKAQVSGQGDSLHEHIANLAGSPAIKKGILQTVKVVDELVKV
MGRHKPENIVIEMARENQTTQKGQKNSRERMKRIEEGIKELGSQILKEHP
VENTQLQNEKLYLYYLQNGRDMYVDQELDINRLSDYDVDHIVPQSFLKDD
SIDNKVLTRSDKNRGKSDNVPSEEVVKKMKNYWRQLLNAKLITQRKFDNL
TKAERGGLSELDKAGFIKRQLVETRQITKHVAQILDSRMNTKYDENDKLI
REVKVITLKSKLVSDFRKDFQFYKVREINNYHHAHDAYLNAVVGTALIKK
YPKLESEFVYGDYKVYDVRKMIAKSEQEITAHAEIMALRQGGLVMQNYRL
IDATLYVTFEPCVMCAGAMIHSRIGRVVFGVRNAKTGAAGSLMDVLHYPG
MNHRVEITEGILADECAALLCYFFRMPRQVFNAQKKAQSSTDGSSGSETP
GTSESATPESSGSEVEFSHEYWMRHALTLAKRARDEREVPVGAVLVLNNR
VIGEGWNRAIGLHDPGKATAKYFFYSNIMNFFKTEITLANGEIRKRPLIE
TNGETGEIVWDKGRDFATVRKVLSMPQVNIVKKTEVQTGGFSKESILPKR
NSDKLIARKKDWDPKKYGGFDSPTVAYSVLVVAKVEKGKSKKLKSVKELL
GITIMERSSFEKNPIDFLEAKGYKEVKKDLIIKLPKYSLFELENGRKRML
ASAGELQKGNELALPSKYVNFLYLASHYEKLKGSPEDNEQKQLFVEQHKH
YLDEIIEQISEFSKRVILADANLDKVLSAYNKHRDKPIREQAENIIHLFT
LTNLGAPAAFKYFDTTIDRKRYTSTKEVLDATLIHQSITGLYETRIDLSQ
LGGD
130 TadA CP65ins 1041
MDKKYSIGLAIGTNSVGWAVITDEYKVPSKKFKVLGNTDRHSIKKNLIGA
LLFDSGETAEATRLKRTARRRYTRRKNRICYLQEIFSNEMAKVDDSFFHR
LEESFLVEEDKKHERHPIFGNIVDEVAYHEKYPTIYHLRKKLVDSTDKAD
LRLIYLALAHMIKFRGHFLIEGDLNPDNSDVDKLFIQLVQTYNQLFEENP
INASGVDAKAILSARLSKSRRLENLIAQLPGEKKNGLFGNLIALSLGLTP
NFKSNFDLAEDAKLQLSKDTYDDDLDNLLAQIGDQYADLFLAAKNLSDAI
LLSDILRVNTEITKAPLSASMIKRYDEHHQDLTLLKALVRQQLPEKYKEI
FFDQSKNGYAGYIDGGASQEEFYKFIKPILEKMDGTEELLVKLNREDLLR
KQRTFDNGSIPHQIHLGELHAILRRQEDFYPFLKDNREKIEKILTFRIPY
YVGPLARGNSRFAWMTRKSEETITPWNFEEVVDKGASAQSFIERMTNFDK
NLPNEKVLPKHSLLYEYFTVYNELTKVKYVTEGMRKPAFLSGEQKKAIVD
LLFKTNRKVTVKQLKEDYFKKIECFDSVEISGVEDRFNASLGTYHDLLKI
IKDKDFLDNEENEDILEDIVLTLTLFEDREMIEERLKTYAHLFDDKVMKQ
LKRRRYTGWGRLSRKLINGIRDKQSGKTILDFLKSDGFANRNFMQLIHDD
SLTFKEDIQKAQVSGQGDSLHEHIANLAGSPAIKKGILQTVKVVDELVKV
MGRHKPENIVIEMARENQTTQKGQKNSRERMKRIEEGIKELGSQILKEHP
VENTQLQNEKLYLYYLQNGRDMYVDQELDINRLSDYDVDHIVPQSFLKDD
SIDNKVLTRSDKNRGKSDNVPSEEVVKKMKNYWRQLLNAKLITQRKFDNL
TKAERGGLSELDKAGFIKRQLVETRQITKHVAQILDSRMNTKYDENDKLI
REVKVITLKSKLVSDFRKDFQFYKVREINNYHHAHDAYLNAVVGTALIKK
YPKLESEFVYGDYKVYDVRKMIAKSEQEIGKATAKYFFYSTAHAEIMALR
QGGLVMQNYRLIDATLYVTFEPCVMCAGAMIHSRIGRVVFGVRNAKTGAA
GSLMDVLHYPGMNHRVEITEGILADECAALLCYFFRMPRQVFNAQKKAQS
STDGSSGSETPGTSESATPESSGSEVEFSHEYWMRHALTLAKRARDEREV
PVGAVLVLNNRVIGEGWNRAIGLHDPNIMNFFKTEITLANGEIRKRPLIE
TNGETGEIVWDKGRDFATVRKVLSMPQVNIVKKTEVQTGGFSKESILPKR
NSDKLIARKKDWDPKKYGGFDSPTVAYSVLVVAKVEKGKSKKLKSVKELL
GITIMERSSFEKNPIDFLEAKGYKEVKKDLIIKLPKYSLFELENGRKRML
ASAGELQKGNELALPSKYVNFLYLASHYEKLKGSPEDNEQKQLFVEQHKH
YLDEIIEQISEFSKRVILADANLDKVLSAYNKHRDKPIREQAENIIHLFT
LTNLGAPAAFKYFDTTIDRKRYTSTKEVLDATLIHQSITGLYETRIDLSQ
LGGD
131 TadA CP65ins 1054
MDKKYSIGLAIGTNSVGWAVITDEYKVPSKKFKVLGNTDRHSIKKNLIGA
LLFDSGETAEATRLKRTARRRYTRRKNRICYLQEIFSNEMAKVDDSFFHR
LEESFLVEEDKKHERHPIFGNIVDEVAYHEKYPTIYHLRKKLVDSTDKAD
LRLIYLALAHMIKFRGHFLIEGDLNPDNSDVDKLFIQLVQTYNQLFEENP
INASGVDAKAILSARLSKSRRLENLIAQLPGEKKNGLFGNLIALSLGLTP
NFKSNFDLAEDAKLQLSKDTYDDDLDNLLAQIGDQYADLFLAAKNLSDAI
LLSDILRVNTEITKAPLSASMIKRYDEHHQDLTLLKALVRQQLPEKYKEI
FFDQSKNGYAGYIDGGASQEEFYKFIKPILEKMDGTEELLVKLNREDLLR
KQRTFDNGSIPHQIHLGELHAILRRQEDFYPFLKDNREKIEKILTFRIPY
YVGPLARGNSRFAWMTRKSEETITPWNFEEVVDKGASAQSFIERMTNFDK
NLPNEKVLPKHSLLYEYFTVYNELTKVKYVTEGMRKPAFLSGEQKKAIVD
LLFKTNRKVTVKQLKEDYFKKIECFDSVEISGVEDRFNASLGTYHDLLKI
IKDKDFLDNEENEDILEDIVLTLTLFEDREMIEERLKTYAHLFDDKVMKQ
LKRRRYTGWGRLSRKLINGIRDKQSGKTILDFLKSDGFANRNFMQLIHDD
SLTFKEDIQKAQVSGQGDSLHEHIANLAGSPAIKKGILQTVKVVDELVKV
MGRHKPENIVIEMARENQTTQKGQKNSRERMKRIEEGIKELGSQILKEHP
VENTQLQNEKLYLYYLQNGRDMYVDQELDINRLSDYDVDHIVPQSFLKDD
SIDNKVLTRSDKNRGKSDNVPSEEVVKKMKNYWRQLLNAKLITQRKFDNL
TKAERGGLSELDKAGFIKRQLVETRQITKHVAQILDSRMNTKYDENDKLI
REVKVITLKSKLVSDFRKDFQFYKVREINNYHHAHDAYLNAVVGTALIKK
YPKLESEFVYGDYKVYDVRKMIAKSEQEIGKATAKYFFYSNIMNFFKTEI
TLANTAHAEIMALRQGGLVMQNYRLIDATLYVTFEPCVMCAGAMIHSRIG
RVVFGVRNAKTGAAGSLMDVLHYPGMNHRVEITEGILADECAALLCYFFR
MPRQVFNAQKKAQSSTDGSSGSETPGTSESATPESSGSEVEFSHEYWMRH
ALTLAKRARDEREVPVGAVLVLNNRVIGEGWNRAIGLHDPGEIRKRPLIE
TNGETGEIVWDKGRDFATVRKVLSMPQVNIVKKTEVQTGGFSKESILPKR
NSDKLIARKKDWDPKKYGGFDSPTVAYSVLVVAKVEKGKSKKLKSVKELL
GITIMERSSFEKNPIDFLEAKGYKEVKKDLIIKLPKYSLFELENGRKRML
ASAGELQKGNELALPSKYVNFLYLASHYEKLKGSPEDNEQKQLFVEQHKH
YLDEIIEQISEFSKRVILADANLDKVLSAYNKHRDKPIREQAENIIHLFT
LTNLGAPAAFKYFDTTIDRKRYTSTKEVLDATLIHQSITGLYETRIDLSQ
LGGD
132 TadA CP65ins 1246
MDKKYSIGLAIGTNSVGWAVITDEYKVPSKKFKVLGNTDRHSIKKNLIGA
LLFDSGETAEATRLKRTARRRYTRRKNRICYLQEIFSNEMAKVDDSFFHR
LEESFLVEEDKKHERHPIFGNIVDEVAYHEKYPTIYHLRKKLVDSTDKAD
LRLIYLALAHMIKFRGHFLIEGDLNPDNSDVDKLFIQLVQTYNQLFEENP
INASGVDAKAILSARLSKSRRLENLIAQLPGEKKNGLFGNLIALSLGLTP
NFKSNFDLAEDAKLQLSKDTYDDDLDNLLAQIGDQYADLFLAAKNLSDAI
LLSDILRVNTEITKAPLSASMIKRYDEHHQDLTLLKALVRQQLPEKYKEI
FFDQSKNGYAGYIDGGASQEEFYKFIKPILEKMDGTEELLVKLNREDLLR
KQRTFDNGSIPHQIHLGELHAILRRQEDFYPFLKDNREKIEKILTFRIPY
YVGPLARGNSRFAWMTRKSEETITPWNFEEVVDKGASAQSFIERMTNFDK
NLPNEKVLPKHSLLYEYFTVYNELTKVKYVTEGMRKPAFLSGEQKKAIVD
LLFKTNRKVTVKQLKEDYFKKIECFDSVEISGVEDRFNASLGTYHDLLKI
IKDKDFLDNEENEDILEDIVLTLTLFEDREMIEERLKTYAHLFDDKVMKQ
LKRRRYTGWGRLSRKLINGIRDKQSGKTILDFLKSDGFANRNFMQLIHDD
SLTFKEDIQKAQVSGQGDSLHEHIANLAGSPAIKKGILQTVKVVDELVKV
MGRHKPENIVIEMARENQTTQKGQKNSRERMKRIEEGIKELGSQILKEHP
VENTQLQNEKLYLYYLQNGRDMYVDQELDINRLSDYDVDHIVPQSFLKDD
SIDNKVLTRSDKNRGKSDNVPSEEVVKKMKNYWRQLLNAKLITQRKFDNL
TKAERGGLSELDKAGFIKRQLVETRQITKHVAQILDSRMNTKYDENDKLI
REVKVITLKSKLVSDFRKDFQFYKVREINNYHHAHDAYLNAVVGTALIKK
YPKLESEFVYGDYKVYDVRKMIAKSEQEIGKATAKYFFYSNIMNFFKTEI
TLANGEIRKRPLIETNGETGEIVWDKGRDFATVRKVLSMPQVNIVKKTEV
QTGGFSKESILPKRNSDKLIARKKDWDPKKYGGFDSPTVAYSVLVVAKVE
KGKSKKLKSVKELLGITIMERSSFEKNPIDFLEAKGYKEVKKDLIIKLPK
YSLFELENGRKRMLASAGELQKGNELALPSKYVNFLYLASHYEKLKGTAH
AEIMALRQGGLVMQNYRLIDATLYVTFEPCVMCAGAMIHSRIGRVVFGVR
NAKTGAAGSLMDVLHYPGMNHRVEITEGILADECAALLCYFFRMPRQVFN
AQKKAQSSTDGSSGSETPGTSESATPESSGSEVEFSHEYWMRHALTLAKR
ARDEREVPVGAVLVLNNRVIGEGWNRAIGLHDPSPEDNEQKQLFVEQHKH
YLDEIIEQISEFSKRVILADANLDKVLSAYNKHRDKPIREQAENIIHLFT
LTNLGAPAAFKYFDTTIDRKRYTSTKEVLDATLIHQSITGLYETRIDLSQ
LGGD

[0604] In some embodiments, Accordingly, adenosine deaminase base editors were generated to insert TadA or variants thereof into the Cas9 polypeptide at the identified positions.

[0605] In some embodiments, a synthetic library of adenosine deaminases alleles, e.g., TadA alleles can be utilized to generate an adenosine base editor with modified base editing efficiency and/or specificity. In some embodiments, an adenosine base editor generated from a synthetic library comprises higher base editing efficiency and/or specificity. In some embodiments, an adenosine base editor generated from a synthetic library exhibits increased base editing efficiency, increased base editing specificity, reduced off-target editing, reduced bystander editing, reduced indel formation, and/or reduced spuriours editing compared to an adenosine base editor with a wild type TadA. In some embodiments, an adenosine base editor generated from a synthetic library exhibits increased base editing efficiency, increased base editing specificity, reduced off-target editing, reduced bystander editing, reduced indel formation, and/or reduced spuriours editing compared to an adenosine base editor with a TadA*7.10. In some embodiments, the synthetic library comprises randomized TadA portion of ABE. In some embodiments, the synthetic library comprises all 20 canonical amino acid substitutions at each position of TadA. In some embodiments, the synthetic library comprises an average frequency of 1-2 nucleotide substitution mutations per library member. In some embodiments, the synthetic library comprises background mutations found in TadA*7.10.

### C to T Editing

[0606] In some embodiments, a base editor disclosed herein comprises a fusion protein comprising a cytidine deaminase capable of deaminating a target cytidine (C) base of a polynucleotide to produce uridine (U), which has the base pairing properties of thymine. In some embodiments, for example, when the polynucleotide is double-stranded (e.g., DNA), the uridine base is substituted with a thymidine base (e.g., by the cellular repair machinery) to give rise to a C:G to a T:A transition. In other embodiments, deamination of a C to U in a nucleic acid by a base editor cannot be accompanied by substitution of the U to a T.

[0607] The deamination of a target C in a polynucleotide to give rise to a U is a non-limiting example of a type of base editing that can be executed by a base editor described herein. In another example, a base editor comprising a cytidine deaminase domain can mediate conversion of a cytidine (C) base to a guanine (G) base. For example, a U of a polynucleotide produced by deamination of a cytidine by a cytidine deaminase domain of a base editor can be excised from the polynucleotide by a base excision repair mechanism (e.g., by a uracil DNA glycosylase (UDG) domain), producing an abasic site. The nucleobase opposite the abasic site can then be substituted (e.g., by base repair machinery) with another base, such as a C, by, for example, a translesion polymerase. Although it is typical for a nucleobase opposite an abasic site to be replaced with a C, other substitutions (e.g., A, G, or T) can also occur.

[0608] Accordingly, in some embodiments a base editor described herein comprises a deamination domain (e.g., cytidine deaminase domain) capable of deaminating a target C to a U in a polynucleotide. Further, as described below, the base editor can comprise additional domains which facilitate conversion of the U resulting from deamination to, in some embodiments, a T or a G. For example, a base editor comprising a cytidine deaminase domain can further comprise a uracil glycosylase inhibitor (UGI) domain to mediate substitution of a U by a T, completing a C-to-T base editing event. In another example, a base editor can incorporate a translesion polymerase to improve the efficiency of C-to-G base editing, since a translesion polymerase can facilitate incorporation of a C opposite an abasic site (i.e., resulting in incorporation of a G at the abasic site and completing the C-to-G base editing event). In some embodiments, the additional domains are internally fused along with the deaminase domain.

[0609] A base editor comprising a cytidine deaminase as a domain can deaminate a target C in any polynucleotide, including DNA, RNA and DNA-RNA hybrids. Typically, a cytidine deaminase catalyzes a C nucleobase that is positioned in the context of a single-stranded portion of a polynucleotide. In some embodiments, the entire polynucleotide comprising a target C can be single-stranded. For example, a cytidine deaminase incorporated into the base editor can deaminate a target C in a single-stranded RNA polynucleotide. In other embodiments, a base editor comprising a cytidine deaminase domain can act on a double-stranded polynucleotide, but the target C can be positioned in a portion of the polynucleotide which at the time of the deamination reaction is in a single-stranded state. For example, in embodiments where the napDNAbp domain comprises a Cas12 domain, several nucleotides can be left unpaired during formation of the Cas12-gRNA-target DNA complex, resulting in formation of a Cas12 “R-loop complex.” These unpaired nucleotides can form a bubble of single-stranded DNA that can serve as a substrate for a single-strand specific nucleotide deaminase enzyme (e.g., a cytidine deaminase).

[0610] In some embodiments, a cytidine deaminase of a base editor can comprise all or a portion of an apolipoprotein B mRNA editing complex (APOBEC) family deaminase. The APOBEC family comprises evolutionarily conserved cytidine deaminases. Members of this family are C-to-U editing enzymes. The N-terminal domain of APOBEC-like proteins is the catalytic domain, while the C-terminal domain is a pseudocatalytic domain. More specifically, the catalytic domain is a zinc dependent cytidine deaminase domain and is important for cytidine deamination. APOBEC family members include APOBECl, APOBEC2, APOBEC3A, APOBEC3B, APOBEC3C, APOBEC3D (now referred to as “APOBEC3E”), APOBEC3F, APOBEC3G, APOBEC3H, APOBEC4, and Activation-induced (cytidine) deaminase (AID). A number of base editors comprising modified cytidine deaminases are commercially available, including but not limited to SaBE3, SaKKH-BE3, VQR-BE3, EQR-BE3, VRER-BE3, YE1-BE3, EE-BE3, YE2-BE3, and YEE-BE3, which are available from Addgene (plasmids 85169, 85170, 85171, 85172, 85173, 85174, 85175, 85176, 85177). In some embodiments, a deaminase incorporated into a base editor comprises all or a portion of an APOBEC1 deaminase. In some embodiments, a deaminase incorporated into a base editor comprises all or a portion of APOBEC2 deaminase. In some embodiments, a deaminase incorporated into a base editor comprises all or a portion of is an APOBEC3 deaminase. In some embodiments, a deaminase incorporated into a base editor comprises all or a portion of an APOBEC3A deaminase. In some embodiments, a deaminase incorporated into a base editor comprises all or a portion of APOBEC3B deaminase. In some embodiments, a deaminase incorporated into a base editor comprises all or a portion of APOBEC3C deaminase. In some embodiments, a deaminase incorporated into a base editor comprises all or a portion of APOBEC3D deaminase. In some embodiments, a deaminase incorporated into a base editor comprises all or a portion of APOBEC3E deaminase. In some embodiments, a deaminase incorporated into a base editor comprises all or a portion of APOBEC3F deaminase. In some embodiments, a deaminase incorporated into a base editor comprises all or a portion of APOBEC3G deaminase. In some embodiments, a deaminase incorporated into a base editor comprises all or a portion of APOBEC3H deaminase. In some embodiments, a deaminase incorporated into a base editor comprises all or a portion of APOBEC4 deaminase. In some embodiments, a deaminase incorporated into a base editor comprises all or a portion of activation-induced deaminase (AID).

[0611] In some embodiments a deaminase incorporated into a base editor comprises all or a portion of cytidine deaminase 1 (CDA1). It will be appreciated that a base editor can comprise a deaminase from any suitable organism (e.g., a human or a rat). In some embodiments, a deaminase domain of a base editor is from a human, chimpanzee, gorilla, monkey, cow, dog, rat, or mouse. In some embodiments, the deaminase domain of the base editor is derived from rat (e.g., rat APOBEC1). In some embodiments, the deaminase domain of the base editor is human APOBEC1. In some embodiments, the deaminase domain of the base editor is pmCDA1.

[0612] The base sequence and amino acid sequence of PmCDA1 and the base sequence and amino acid sequence of CDS of human AID are shown herein below.

>tr|A5H718|A5H718_PETMA Cytosine deaminase OS = Petromyzon marinus
OX = 7757 PE = 2 SV = 1
MTDAEYVRIHEKLDIYTFKKQFFNNKKSVSHRCYVLFELKRRGERRACFWGYAVNKPQSGTE
RGIHAEIFSIRKVEEYLRDNPGQFTINWYSSWSPCADCAEKILEWYNQELRGNGHTLKIWAC
KLYYEKNARNQIGLWNLRDNGVGLNVMVSEHYQCCRKIFIQSSHNQLNENRWLEKTLKRAEK
RRSELSIMIQVKILHTTKSPAV
>EF094822.1 Petromyzon marinus isolate PmCDA.21 cytosine deaminase mRNA,
complete cds
TGACACGACACAGCCGTGTATATGAGGAAGGGTAGCTGGATGGGGGGGGGGGGAATACGTTC
AGAGAGGACATTAGCGAGCGTCTTGTTGGTGGCCTTGAGTCTAGACACCTGCAGACATGACC
GACGCTGAGTACGTGAGAATCCATGAGAAGTTGGACATCTACACGTTTAAGAAACAGTTTTT
CAACAACAAAAAATCCGTGTCGCATAGATGCTACGTTCTCTTTGAATTAAAACGACGGGGTG
AACGTAGAGCGTGTTTTTGGGGCTATGCTGTGAATAAACCACAGAGCGGGACAGAACGTGGA
ATTCACGCCGAAATCTTTAGCATTAGAAAAGTCGAAGAATACCTGCGCGACAACCCCGGACA
ATTCACGATAAATTGGTACTCATCCTGGAGTCCTTGTGCAGATTGCGCTGAAAAGATCTTAG
AATGGTATAACCAGGAGCTGCGGGGGAACGGCCACACTTTGAAAATCTGGGCTTGCAAACTC
TATTACGAGAAAAATGCGAGGAATCAAATTGGGCTGTGGAACCTCAGAGATAACGGGGTTGG
GTTGAATGTAATGGTAAGTGAACACTACCAATGTTGCAGGAAAATATTCATCCAATCGTCGC
ACAATCAATTGAATGAGAATAGATGGCTTGAGAAGACTTTGAAGCGAGCTGAAAAACGACGG
AGCGAGTTGTCCATTATGATTCAGGTAAAAATACTCCACACCACTAAGAGTCCTGCTGTTTA
AGAGGCTATGCGGATGGTTTTC
>tr|Q6QJ80|Q6QJ80_HUMAN Activation-induced cytidine deaminase
OS = Homo sapiens OX = 9606 GN = AICDA PE = 2 SV = 1
MDSLLMNRRKFLYQFKNVRWAKGRRETYLCYVVKRRDSATSFSLDFGYLRNKNGCHVELLFL
RYISDWDLDPGRCYRVTWFTSWSPCYDCARHVADFLRGNPNLSLRIFTARLYFCEDRKAEPE
GLRRLHRAGVQIAIMTFKAPV
>NG_011588.1:5001-15681 Homo sapiens activation induced cytidine deaminase
(AICDA), RefSeqGene (LRG_17) on chromosome 12
AGAGAACCATCATTAATTGAAGTGAGATTTTTCTGGCCTGAGACTTGCAGGGAGGCAAGAAG
ACACTCTGGACACCACTATGGACAGGTAAAGAGGCAGTCTTCTCGTGGGTGATTGCACTGGC
CTTCCTCTCAGAGCAAATCTGAGTAATGAGACTGGTAGCTATCCCTTTCTCTCATGTAACTG
TCTGACTGATAAGATCAGCTTGATCAATATGCATATATATTTTTTGATCTGTCTCCTTTTCT
TCTATTCAGATCTTATACGCTGTCAGCCCAATTCTTTCTGTTTCAGACTTCTCTTGATTTCC
CTCTTTTTCATGTGGCAAAAGAAGTAGTGCGTACAATGTACTGATTCGTCCTGAGATTTGTA
CCATGGTTGAAACTAATTTATGGTAATAATATTAACATAGCAAATCTTTAGAGACTCAAATC
ATGAAAAGGTAATAGCAGTACTGTACTAAAAACGGTAGTGCTAATTTTCGTAATAATTTTGT
AAATATTCAACAGTAAAACAACTTGAAGACACACTTTCCTAGGGAGGCGTTACTGAAATAAT
TTAGCTATAGTAAGAAAATTTGTAATTTTAGAAATGCCAAGCATTCTAAATTAATTGCTTGA
AAGTCACTATGATTGTGTCCATTATAAGGAGACAAATTCATTCAAGCAAGTTATTTAATGTT
AAAGGCCCAATTGTTAGGCAGTTAATGGCACTTTTACTATTAACTAATCTTTCCATTTGTTC
AGACGTAGCTTAACTTACCTCTTAGGTGTGAATTTGGTTAAGGTCCTCATAATGTCTTTATG
TGCAGTTTTTGATAGGTTATTGTCATAGAACTTATTCTATTCCTACATTTATGATTACTATG
GATGTATGAGAATAACACCTAATCCTTATACTTTACCTCAATTTAACTCCTTTATAAAGAAC
TTACATTACAGAATAAAGATTTTTTAAAAATATATTTTTTTGTAGAGACAGGGTCTTAGCCC
AGCCGAGGCTGGTCTCTAAGTCCTGGCCCAAGCGATCCTCCTGCCTGGGCCTCCTAAAGTGC
TGGAATTATAGACATGAGCCATCACATCCAATATACAGAATAAAGATTTTTAATGGAGGATT
TAATGTTCTTCAGAAAATTTTCTTGAGGTCAGACAATGTCAAATGTCTCCTCAGTTTACACT
GAGATTTTGAAAACAAGTCTGAGCTATAGGTCCTTGTGAAGGGTCCATTGGAAATACTTGTT
CAAAGTAAAATGGAAAGCAAAGGTAAAATCAGCAGTTGAAATTCAGAGAAAGACAGAAAAGG
AGAAAAGATGAAATTCAACAGGACAGAAGGGAAATATATTATCATTAAGGAGGACAGTATCT
GTAGAGCTCATTAGTGATGGCAAAATGACTTGGTCAGGATTATTTTTAACCCGCTTGTTTCT
GGTTTGCACGGCTGGGGATGCAGCTAGGGTTCTGCCTCAGGGAGCACAGCTGTCCAGAGCAG
CTGTCAGCCTGCAAGCCTGAAACACTCCCTCGGTAAAGTCCTTCCTACTCAGGACAGAAATG
ACGAGAACAGGGAGCTGGAAACAGGCCCCTAACCAGAGAAGGGAAGTAATGGATCAACAAAG
TTAACTAGCAGGTCAGGATCACGCAATTCATTTCACTCTGACTGGTAACATGTGACAGAAAC
AGTGTAGGCTTATTGTATTTTCATGTAGAGTAGGACCCAAAAATCCACCCAAAGTCCTTTAT
CTATGCCACATCCTTCTTATCTATACTTCCAGGACACTTTTTCTTCCTTATGATAAGGCTCT
CTCTCTCTCCACACACACACACACACACACACACACACACACACACACACACACAAACACAC
ACCCCGCCAACCAAGGTGCATGTAAAAAGATGTAGATTCCTCTGCCTTTCTCATCTACACAG
CCCAGGAGGGTAAGTTAATATAAGAGGGATTTATTGGTAAGAGATGATGCTTAATCTGTTTA
ACACTGGGCCTCAAAGAGAGAATTTCTTTTCTTCTGTACTTATTAAGCACCTATTATGTGTT
GAGCTTATATATACAAAGGGTTATTATATGCTAATATAGTAATAGTAATGGTGGTTGGTACT
ATGGTAATTACCATAAAAATTATTATCCTTTTAAAATAAAGCTAATTATTATTGGATCTTTT
TTAGTATTCATTTTATGTTTTTTATGTTTTTGATTTTTTAAAAGACAATCTCACCCTGTTAC
CCAGGCTGGAGTGCAGTGGTGCAATCATAGCTTTCTGCAGTCTTGAACTCCTGGGCTCAAGC
AATCCTCCTGCCTTGGCCTCCCAAAGTGTTGGGATACAGTCATGAGCCACTGCATCTGGCCT
AGGATCCATTTAGATTAAAATATGCATTTTAAATTTTAAAATAATATGGCTAATTTTTACCT
TATGTAATGTGTATACTGGCAATAAATCTAGTTTGCTGCCTAAAGTTTAAAGTGCTTTCCAG
TAAGCTTCATGTACGTGAGGGGAGACATTTAAAGTGAAACAGACAGCCAGGTGTGGTGGCTC
ACGCCTGTAATCCCAGCACTCTGGGAGGCTGAGGTGGGTGGATCGCTTGAGCCCTGGAGTTC
AAGACCAGCCTGAGCAACATGGCAAAACGCTGTTTCTATAACAAAAATTAGCCGGGCATGGT
GGCATGTGCCTGTGGTCCCAGCTACTAGGGGGCTGAGGCAGGAGAATCGTTGGAGCCCAGGA
GGTCAAGGCTGCACTGAGCAGTGCTTGCGCCACTGCACTCCAGCCTGGGTGACAGGACCAGA
CCTTGCCTCAAAAAAATAAGAAGAAAAATTAAAAATAAATGGAAACAACTACAAAGAGCTGT
TGTCCTAGATGAGCTACTTAGTTAGGCTGATATTTTGGTATTTAACTTTTAAAGTCAGGGTC
TGTCACCTGCACTACATTATTAAAATATCAATTCTCAATGTATATCCACACAAAGACTGGTA
CGTGAATGTTCATAGTACCTTTATTCACAAAACCCCAAAGTAGAGACTATCCAAATATCCAT
CAACAAGTGAACAAATAAACAAAATGTGCTATATCCATGCAATGGAATACCACCCTGCAGTA
CAAAGAAGCTACTTGGGGATGAATCCCAAAGTCATGACGCTAAATGAAAGAGTCAGACATGA
AGGAGGAGATAATGTATGCCATACGAAATTCTAGAAAATGAAAGTAACTTATAGTTACAGAA
AGCAAATCAGGGCAGGCATAGAGGCTCACACCTGTAATCCCAGCACTTTGAGAGGCCACGTG
GGAAGATTGCTAGAACTCAGGAGTTCAAGACCAGCCTGGGCAACACAGTGAAACTCCATTCT
CCACAAAAATGGGAAAAAAAGAAAGCAAATCAGTGGTTGTCCTGTGGGGAGGGGAAGGACTG
CAAAGAGGGAAGAAGCTCTGGTGGGGTGAGGGTGGTGATTCAGGTTCTGTATCCTGACTGTG
GTAGCAGTTTGGGGTGTTTACATCCAAAAATATTCGTAGAATTATGCATCTTAAATGGGTGG
AGTTTACTGTATGTAAATTATACCTCAATGTAAGAAAAAATAATGTGTAAGAAAACTTTCAA
TTCTCTTGCCAGCAAACGTTATTCAAATTCCTGAGCCCTTTACTTCGCAAATTCTCTGCACT
TCTGCCCCGTACCATTAGGTGACAGCACTAGCTCCACAAATTGGATAAATGCATTTCTGGAA
AAGACTAGGGACAAAATCCAGGCATCACTTGTGCTTTCATATCAACCATGCTGTACAGCTTG
TGTTGCTGTCTGCAGCTGCAATGGGGACTCTTGATTTCTTTAAGGAAACTTGGGTTACCAGA
GTATTTCCACAAATGCTATTCAAATTAGTGCTTATGATATGCAAGACACTGTGCTAGGAGCC
AGAAAACAAAGAGGAGGAGAAATCAGTCATTATGTGGGAACAACATAGCAAGATATTTAGAT
CATTTTGACTAGTTAAAAAAGCAGCAGAGTACAAAATCACACATGCAATCAGTATAATCCAA
ATCATGTAAATATGTGCCTGTAGAAAGACTAGAGGAATAAACACAAGAATCTTAACAGTCAT
TGTCATTAGACACTAAGTCTAATTATTATTATTAGACACTATGATATTTGAGATTTAAAAAA
TCTTTAATATTTTAAAATTTAGAGCTCTTCTATTTTTCCATAGTATTCAAGTTTGACAATGA
TCAAGTATTACTCTTTCTTTTTTTTTTTTTTTTTTTTTTTTTGAGATGGAGTTTTGGTCTTG
TTGCCCATGCTGGAGTGGAATGGCATGACCATAGCTCACTGCAACCTCCACCTCCTGGGTTC
AAGCAAAGCTGTCGCCTCAGCCTCCCGGGTAGATGGGATTACAGGCGCCCACCACCACACTC
GGCTAATGTTTGTATTTTTAGTAGAGATGGGGTTTCACCATGTTGGCCAGGCTGGTCTCAAA
CTCCTGACCTCAGAGGATCCACCTGCCTCAGCCTCCCAAAGTGCTGGGATTACAGATGTAGG
CCACTGCGCCCGGCCAAGTATTGCTCTTATACATTAAAAAACAGGTGTGAGCCACTGCGCCC
AGCCAGGTATTGCTCTTATACATTAAAAAATAGGCCGGTGCAGTGGCTCACGCCTGTAATCC
CAGCACTTTGGGAAGCCAAGGCGGGCAGAACACCCGAGGTCAGGAGTCCAAGGCCAGCCTGG
CCAAGATGGTGAAACCCCGTCTCTATTAAAAATACAAACATTACCTGGGCATGATGGTGGGC
GCCTGTAATCCCAGCTACTCAGGAGGCTGAGGCAGGAGGATCCGCGGAGCCTGGCAGATCTG
CCTGAGCCTGGGAGGTTGAGGCTACAGTAAGCCAAGATCATGCCAGTATACTTCAGCCTGGG
CGACAAAGTGAGACCGTAACAAAAAAAAAAAAATTTAAAAAAAGAAATTTAGATCAAGATCC
AACTGTAAAAAGTGGCCTAAACACCACATTAAAGAGTTTGGAGTTTATTCTGCAGGCAGAAG
AGAACCATCAGGGGGTCTTCAGCATGGGAATGGCATGGTGCACCTGGTTTTTGTGAGATCAT
GGTGGTGACAGTGTGGGGAATGTTATTTTGGAGGGACTGGAGGCAGACAGACCGGTTAAAAG
GCCAGCACAACAGATAAGGAGGAAGAAGATGAGGGCTTGGACCGAAGCAGAGAAGAGCAAAC
AGGGAAGGTACAAATTCAAGAAATATTGGGGGGTTTGAATCAACACATTTAGATGATTAATT
AAATATGAGGACTGAGGAATAAGAAATGAGTCAAGGATGGTTCCAGGCTGCTAGGCTGCTTA
CCTGAGGTGGCAAAGTCGGGAGGAGTGGCAGTTTAGGACAGGGGGCAGTTGAGGAATATTGT
TTTGATCATTTTGAGTTTGAGGTACAAGTTGGACACTTAGGTAAAGACTGGAGGGGAAATCT
GAATATACAATTATGGGACTGAGGAACAAGTTTATTTTATTTTTTGTTTCGTTTTCTTGTTG
AAGAACAAATTTAATTGTAATCCCAAGTCATCAGCATCTAGAAGACAGTGGCAGGAGGTGAC
TGTCTTGTGGGTAAGGGTTTGGGGTCCTTGATGAGTATCTCTCAATTGGCCTTAAATATAAG
CAGGAAAAGGAGTTTATGATGGATTCCAGGCTCAGCAGGGCTCAGGAGGGCTCAGGCAGCCA
GCAGAGGAAGTCAGAGCATCTTCTTTGGTTTAGCCCAAGTAATGACTTCCTTAAAAAGCTGA
AGGAAAATCCAGAGTGACCAGATTATAAACTGTACTCTTGCATTTTCTCTCCCTCCTCTCAC
CCACAGCCTCTTGATGAACCGGAGGAAGTTTCTTTACCAATTCAAAAATGTCCGCTGGGCTA
AGGGTCGGCGTGAGACCTACCTGTGCTACGTAGTGAAGAGGCGTGACAGTGCTACATCCTTT
TCACTGGACTTTGGTTATCTTCGCAATAAGGTATCAATTAAAGTCGGCTTTGCAAGCAGTTT
AATGGTCAACTGTGAGTGCTTTTAGAGCCACCTGCTGATGGTATTACTTCCATCCTTTTTTG
GCATTTGTGTCTCTATCACATTCCTCAAATCCTTTTTTTTATTTCTTTTTCCATGTCCATGC
ACCCATATTAGACATGGCCCAAAATATGTGATTTAATTCCTCCCCAGTAATGCTGGGCACCC
TAATACCACTCCTTCCTTCAGTGCCAAGAACAACTGCTCCCAAACTGTTTACCAGCTTTCCT
CAGCATCTGAATTGCCTTTGAGATTAATTAAGCTAAAAGCATTTTTATATGGGAGAATATTA
TCAGCTTGTCCAAGCAAAAATTTTAAATGTGAAAAACAAATTGTGTCTTAAGCATTTTTGAA
AATTAAGGAAGAAGAATTTGGGAAAAAATTAACGGTGGCTCAATTCTGTCTTCCAAATGATT
TCTTTTCCCTCCTACTCACATGGGTCGTAGGCCAGTGAATACATTCAACATGGTGATCCCCA
GAAAACTCAGAGAAGCCTCGGCTGATGATTAATTAAATTGATCTTTCGGCTACCCGAGAGAA
TTACATTTCCAAGAGACTTCTTCACCAAAATCCAGATGGGTTTACATAAACTTCTGCCCACG
GGTATCTCCTCTCTCCTAACACGCTGTGACGTCTGGGCTTGGTGGAATCTCAGGGAAGCATC
CGTGGGGTGGAAGGTCATCGTCTGGCTCGTTGTTTGATGGTTATATTACCATGCAATTTTCT
TTGCCTACATTTGTATTGAATACATCCCAATCTCCTTCCTATTCGGTGACATGACACATTCT
ATTTCAGAAGGCTTTGATTTTATCAAGCACTTTCATTTACTTCTCATGGCAGTGCCTATTAC
TTCTCTTACAATACCCATCTGTCTGCTTTACCAAAATCTATTTCCCCTTTTCAGATCCTCCC
AAATGGTCCTCATAAACTGTCCTGCCTCCACCTAGTGGTCCAGGTATATTTCCACAATGTTA
CATCAACAGGCACTTCTAGCCATTTTCCTTCTCAAAAGGTGCAAAAAGCAACTTCATAAACA
CAAATTAAATCTTCGGTGAGGTAGTGTGATGCTGCTTCCTCCCAACTCAGCGCACTTCGTCT
TCCTCATTCCACAAAAACCCATAGCCTTCCTTCACTCTGCAGGACTAGTGCTGCCAAGGGTT
CAGCTCTACCTACTGGTGTGCTCTTTTGAGCAAGTTGCTTAGCCTCTCTGTAACACAAGGAC
AATAGCTGCAAGCATCCCCAAAGATCATTGCAGGAGACAATGACTAAGGCTACCAGAGCCGC
AATAAAAGTCAGTGAATTTTAGCGTGGTCCTCTCTGTCTCTCCAGAACGGCTGCCACGTGGA
ATTGCTCTTCCTCCGCTACATCTCGGACTGGGACCTAGACCCTGGCCGCTGCTACCGCGTCA
CCTGGTTCACCTCCTGGAGCCCCTGCTACGACTGTGCCCGACATGTGGCCGACTTTCTGCGA
GGGAACCCCAACCTCAGTCTGAGGATCTTCACCGCGCGCCTCTACTTCTGTGAGGACCGCAA
GGCTGAGCCCGAGGGGCTGCGGCGGCTGCACCGCGCCGGGGTGCAAATAGCCATCATGACCT
TCAAAGGTGCGAAAGGGCCTTCCGCGCAGGCGCAGTGCAGCAGCCCGCATTCGGGATTGCGA
TGCGGAATGAATGAGTTAGTGGGGAAGCTCGAGGGGAAGAAGTGGGCGGGGATTCTGGTTCA
CCTCTGGAGCCGAAATTAAAGATTAGAAGCAGAGAAAAGAGTGAATGGCTCAGAGACAAGGC
CCCGAGGAAATGAGAAAATGGGGCCAGGGTTGCTTCTTTCCCCTCGATTTGGAACCTGAACT
GTCTTCTACCCCCATATCCCCGCCTTTTTTTCCTTTTTTTTTTTTTGAAGATTATTTTTACT
GCTGGAATACTTTTGTAGAAAACCACGAAAGAACTTTCAAAGCCTGGGAAGGGCTGCATGAA
AATTCAGTTCGTCTCTCCAGACAGCTTCGGCGCATCCTTTTGGTAAGGGGCTTCCTCGCTTT
TTAAATTTTCTTTCTTTCTCTACAGTCTTTTTTGGAGTTTCGTATATTTCTTATATTTTCTT
ATTGTTCAATCACTCTCAGTTTTCATCTGATGAAAACTTTATTTCTCCTCCACATCAGCTTT
TTCTTCTGCTGTTTCACCATTCAGAGCCCTCTGCTAAGGTTCCTTTTCCCTCCCTTTTCTTT
CTTTTGTTGTTTCACATCTTTAAATTTCTGTCTCTCCCCAGGGTTGCGTTTCCTTCCTGGTC
AGAATTCTTTTCTCCTTTTTTTTTTTTTTTTTTTTTTTTTTTAAACAAACAAACAAAAAACC
CAAAAAAACTCTTTCCCAATTTACTTTCTTCCAACATGTTACAAAGCCATCCACTCAGTTTA
GAAGACTCTCCGGCCCCACCGACCCCCAACCTCGTTTTGAAGCCATTCACTCAATTTGCTTC
TCTCTTTCTCTACAGCCCCTGTATGAGGTTGATGACTTACGAGACGCATTTCGTACTTTGGG
ACTTTGATAGCAACTTCCAGGAATGTCACACACGATGAAATATCTCTGCTGAAGACAGTGGA
TAAAAAACAGTCCTTCAAGTCTTCTCTGTTTTTATTCTTCAACTCTCACTTTCTTAGAGTTT
ACAGAAAAAATATTTATATACGACTCTTTAAAAAGATCTATGTCTTGAAAATAGAGAAGGAA
CACAGGTCTGGCCAGGGACGTGCTGCAATTGGTGCAGTTTTGAATGCAACATTGTCCCCTAC
TGGGAATAACAGAACTGCAGGACCTGGGAGCATCCTAAAGTGTCAACGTTTTTCTATGACTT
TTAGGTAGGATGAGAGCAGAAGGTAGATCCTAAAAAGCATGGTGAGAGGATCAAATGTTTTT
ATATCAACATCCTTTATTATTTGATTCATTTGAGTTAACAGTGGTGTTAGTGATAGATTTTT
CTATTCTTTTCCCTTGACGTTTACTTTCAAGTAACACAAACTCTTCCATCAGGCCATGATCT
ATAGGACCTCCTAATGAGAGTATCTGGGTGATTGTGACCCCAAACCATCTCTCCAAAGCATT
AATATCCAATCATGCGCTGTATGTTTTAATCAGCAGAAGCATGTTTTTATGTTTGTACAAAA
GAAGATTGTTATGGGTGGGGATGGAGGTATAGACCATGCATGGTCACCTTCAAGCTACTTTA
ATAAAGGATCTTAAAATGGGCAGGAGGACTGTGAACAAGACACCCTAATAATGGGTTGATGT
CTGAAGTAGCAAATCTTCTGGAAACGCAAACTCTTTTAAGGAAGTCCCTAATTTAGAAACAC
CCACAAACTTCACATATCATAATTAGCAAACAATTGGAAGGAAGTTGCTTGAATGTTGGGGA
GAGGAAAATCTATTGGCTCTCGTGGGTCTCTTCATCTCAGAAATGCCAATCAGGTCAAGGTT
TGCTACATTTTGTATGTGTGTGATGCTTCTCCCAAAGGTATATTAACTATATAAGAGAGTTG
TGACAAAACAGAATGATAAAGCTGCGAACCGTGGCACACGCTCATAGTTCTAGCTGCTTGGG
AGGTTGAGGAGGGAGGATGGCTTGAACACAGGTGTTCAAGGCCAGCCTGGGCAACATAACAA
GATCCTGTCTCTCAAAAAAAAAAAAAAAAAAAAGAAAGAGAGAGGGCCGGGCGTGGTGGCTC
ACGCCTGTAATCCCAGCACTTTGGGAGGCCGAGCCGGGCGGATCACCTGTGGTCAGGAGTTT
GAGACCAGCCTGGCCAACATGGCAAAACCCCGTCTGTACTCAAAATGCAAAAATTAGCCAGG
CGTGGTAGCAGGCACCTGTAATCCCAGCTACTTGGGAGGCTGAGGCAGGAGAATCGCTTGAA
CCCAGGAGGTGGAGGTTGCAGTAAGCTGAGATCGTGCCGTTGCACTCCAGCCTGGGCGACAA
GAGCAAGACTCTGTCTCAGAAAAAAAAAAAAAAAAGAGAGAGAGAGAGAAAGAGAACAATAT
TTGGGAGAGAAGGATGGGGAAGCATTGCAAGGAAATTGTGCTTTATCCAACAAAATGTAAGG
AGCCAATAAGGGATCCCTATTTGTCTCTTTTGGTGTCTATTTGTCCCTAACAACTGTCTTTG
ACAGTGAGAAAAATATTCAGAATAACCATATCCCTGTGCCGTTATTACCTAGCAACCCTTGC
AATGAAGATGAGCAGATCCACAGGAAAACTTGAATGCACAACTGTCTTATTTTAATCTTATT
GTACATAAGTTTGTAAAAGAGTTAAAAATTGTTACTTCATGTATTCATTTATATTTTATATT
ATTTTGCGTCTAATGATTTTTTATTAACATGATTTCCTTTTCTGATATATTGAAATGGAGTC
TCAAAGCTTCATAAATTTATAACTTTAGAAATGATTCTAATAACAACGTATGTAATTGTAAC
ATTGCAGTAATGGTGCTACGAAGCCATTTCTCTTGATTTTTAGTAAACTTTTATGACAGCAA
ATTTGCTTCTGGCTCACTTTCAATCAGTTAAATAAATGATAAATAATTTTGGAAGCTGTGAA
GATAAAATACCAAATAAAATAATATAAAAGTGATTTATATGAAGTTAAAATAAAAAATCAGT
ATGATGGAATAAACTTG

[0613] Other cytidine deaminases useful in the methods of the invention are provided below.

rAPOBEC-1 Rattus norvegicus
[sequence omitted]
mAPOBEC-1 Mus musculus
MSSETGPVAVDPTLRRRIEPHEFEVFFDPRELRKETCLLYEINWGGRHSVWRHTSQNTSN
HVEVNFLEKFTTERYFRPNTRCSITWFLSWSPCGECSRAITEFLSRHPYVTLFIYIARLY
HHTDQRNRQGLRDLISSGVTIQIMTEQEYCYCWRNFVNYPPSNEAYWPRYPHLWVK
LYVLELYCIILGLPPCLKILRRKQPQLTFFTITLQTCHYQRIPPHLLWATGLK
maAPOBEC-1 Mesocricetus auratus
MSSETGPVVVDPTLRRRIEPHEFDAFFDQGELRKETCLLYEIRWGGRHNIWRHTGQN
TSRHVEINFIEKFTSERYFYPSTRCSIVWFLSWSPCGECSKAITEFLSGHPNVTLFIYAA
RLY
HHTDQRNRQGLRDLISRGVTIRIMTEQEYCYCWRNFVNYPPSNEVYWPRYPNLWMR
LYALELYCIHLGLPPCLKIKRRHQYPLTFFRLNLQSCHYQRIPPHILWATGFI
hAPOBEC-1 Homo sapiens
MTSEKGPSTGDPTLRRRIEPWEFDVFYDPRELRKEACLLYEIKWGMSRKIWRSSGKN
TTNHVEVNFIKKFTSERDFHPSMSCSITWFLSWSPCWECSQAIREFLSRHPGVTLVIYV
ARLF
WHMDQQNRQGLRDLVNSGVTIQIMRASEYYHCWRNFVNYPPGDEAHWPQYPPLW
MMLYALELHCIILSLPPCLKISRRWQNHLTFFRLHLQNCHYQTIPPHILLATGLIHPSV
AWR
ppAPOBEC-1 Pongo pygmaeus
MTSEKGPSTGDPTLRRRIESWEFDVFYDPRELRKETCLLYEIKWGMSRKIWRSSGKN
TTNHVEVNFIKKFTSERRFHSSISCSITWFLSWSPCWECSQAIREFLSQHPGVTLVIYV
ARLF
WHMDQRNRQGLRDLVNSGVTIQIMRASEYYHCWRNFVNYPPGDEAHWPQYPPLW
MMLYALELHCIILSLPPCLKISRRWQNHLAFFRLHLQNCHYQTIPPHILLATGLIHPSV
TWR
ocAPOBEC1 Oryctolagus cuniculus
MASEKGPSNKDYTLRRRIEPWEFEVFFDPQELRKEACLLYEIKWGASSKTWRSSGKN
TTNHVEVNFLEKLTSEGRLGPSTCCSITWFLSWSPCWECSMAIREFLSQHPGVTLIIFV
ARLF
QHMDRRNRQGLKDLVTSGVTVRVMSVSEYCYCWENFVNYPPGKAAQWPRYPPRW
MLMYALELYCIILGLPPCLKISRRHQKQLTFFSLTPQYCHYKMIPPYILLATGLLQPSV
PWR
mdAPOBEC-1 Monodelphis domestica
MNSKTGPSVGDATLRRRIKPWEFVAFFNPQELRKETCLLYEIKWGNQN1WRHSNQN
TSQHAEINFMEKFTAERHFNSSVRCSITWFLSWSPCWECSKAIRKFLDHYPNVTLAIFI
SRLYWHMDQQHRQGLKELVHSGVTIQIMSYSEYHYCWRNFVDYPQGEEDYWPKYP
YLWIMLYVLELHCIILGLPPCLKISGSHSNQLALFSLDLQDCHYQKIPYNVLVATGLV
QPFVTWR
mAPOBEC-2 Mus musculus
MAQKEEAAEAAAPASQNGDDLENLEDPEKLKELIDLPPFEIVTGVRLPVNFFKFQFR
NVEYSSGRNKTFLCYVVEVQSKGGQAQATQGYLEDEHAGAHAEEAFFNTILPAFDP
ALKYNVTWYVSSSPCAACADRILKTLSKTKNLRLLILVSRLFMWEEPEVQAALKKL
KEAGCKLRIMKPQDFEYIWQNFVEQEEGESKAFEPWEDIQENFLYYEEKLADILK
hAPOBEC-2 Homo sapiens
MAQKEEAAVATEAASQNGEDLENLDDPEKLKELIELPPFEIVTGERLPANFFKFQFRN
VE
YSSGRNKTFLCYVVEAQGKGGQVQASRGYLEDEHAAAHAEEAFFNTILPAFDPALR
YNVTWYVSSSPCAACADRIIKTLSKTKNLRLLILVGRLFMWEEPEIQAALKKLKEAG
CKLRIMKPQDFEYVWQNFVEQEEGESKAFQPWEDIQENFLYYEEKLADILK
ppAPOBEC-2 Pongo pygmaeus
MAQKEEAAAATEAASQNGEDLENLDDPEKLKELIELPPFEIVTGERLPANFFKFQFRN
VE
YSSGRNKTFLCYVVEAQGKGGQVQASRGYLEDEHAAAHAEEAFFNTILPAFDPALR
YNVTWYVSSSPCAACADRIIKTLSKTKNLRLLILVGRLFMWEELEIQDALKKLKEAG
CKLRIMKPQDFEYVWQNFVEQEEGESKAFQPWEDIQENFLYYEEKLADILK
btAPOBEC-2 Bos Taurus
MAQKEEAAAAAEPASQNGEEVENLEDPEKLKELIELPPFEIVTGERLPAHYFKFQFRN
VE
YSSGRNKTFLCYVVEAQSKGGQVQASRGYLEDEHATNHAEEAFFNSIMPTFDPALR
YMVTWYVSSSPCAACADRIVKTLNKTKNLRLLILVGRLFMWEEPEIQAALRKLKEA
GCRLRIMKPQDFEYIWQNFVEQEEGESKAFEPWEDIQENFLYYEEKLADILK
mAPOBEC-3 Mus musculus
MQPQRLGPRAGMGPFCLGCSHRKCYSPIRNLISQETFKFHFKNLGYAKGRKDTFLCY
EVTRKDCDSPVSLHHGVFKNKDNIHAEICFLYWFHDKVLKVLSPREEFKITWYMSW
SPCFECAEQIVRFLATHHNLSLDIFSSRLYNVQDPETQQNLCRLVQEGAQVAAMDLY
EFKKCWKKFVDNGGRRFRPWKRLLTNFRYQDSKLQEILRPCYISVPSSSSSTLSNICL
TKGLPETRFWVEGRRMDPLSEEEFYSQFYNQRVKHLCYYHRMKPYLCYQLEQFNG
QAPLKGCLLSEKGKQHAEILFLDKIRSMELSQVTITCYLTWSPCPNCAWQLAAFKRD
RPDLILHIYTSRLYFHWKRPFQKGLCSLWQSGILVDVMDLPQFTDCWTNFVNPKRPF
WPWKGLEIISRRTQRRLRRIKESWGLQDLVNDFGNLQLGPPMS
hAPOBEC-3A Homo sapiens
MEASPASGPRHLMDPHIFTSNFNNGIGREIKTYLCYEVERLDNGTSVKMDQHRGFLH
NQAKNLLCGFYGRHAELRFLDLVPSLQLDPAQIYRVTWFISWSPCFSWGCAGEVRAF
LQENTHVRLRIFAARIYDYDPLYKEALQMLRDAGAQVSIMTYDEFKHCWDTFVDHQ
GCPFQPWDGLDEHSQALSGRLRAILQNQGN
hAPOBEC-3B Homo sapiens
MNPQIRNPMERMYRDTFYDNFENEPILYGRSYTWLCYEVKIKRGRSNLLWDTGVFR
GQVYFKPQYHAEMCFLSWFCGNQLPAYKCFQITWFVSWTPCPDCVAKLAEFLSEHP
NVTLTISAARLYYYWERDYRRALCRLSQAGARVTIMDYEEFAYCWENFVYNEGQQ
FMPWYKFDENYAFLHRTLKEILRYLMDPDTFTFNFNNDPLVLRRRQTYLCYEVERL
DNGTWVLMDQHMGFLCNEAKNLLCGFYGRHAELRFLDLVPSLQLDPAQIYRVTWFI
SWSPCFSWGCAGEVRAFLQENTHVRLRIFAARIYDYDPLYKEALQMLRDAGAQVSI
MTYDEFEYCWDTFVYRQGCPFQPWDGLEEHSQALSGRLRAILQNQGN
hAPOBEC-3C Homo sapiens
MNPQIRNPMKAMYPGTFYFQFKNLWEANDRNETWLCFTVEGIKRRSVVSWKTGVF
RNQVDSETHCHAERCFLSWFCDDILSPNTKYQVTWYTSWSPCPDCAGEVAEFLARH
SNVNLTIFTARLYYFQYPCYQEGLRSLSQEGVAVEIMDYEDFKYCWENFVYNDNEPF
KPWKGLKTNFRLLKRRLRESLQ
hAPOBEC-3D Homo sapiens
MNPQIRNPMERMYRDTFYDNFENEPILYGRSYTWLCYEVKIKRGRSNLLWDTGVFR
GPVLPKRQSNHRQEVYFRFENHAEMCFLSWFCGNRLPANRRFQITWFVSWNPCLPC
VVKVTKFLAEHPNVTLTISAARLYYYRDRDWRWVLLRLHKAGARVKIMDYEDFAY
CWENFVCNEGQPFMPWYKFDDNYASLHRTLKEILRNPMEAMYPHIFYFHFKNLLKA
CGRNESWLCFTMEVTKHHSAVFRKRGVFRNQVDPETHCHAERCFLSWFCDDILSPN
TNYEVTWYTSWSPCPECAGEVAEFLARHSNVNLTIFTARLCYFWDTDYQEGLCSLS
QEGASVKIMGYKDFVSCWKNFVYSDDEPFKPWKGLQTNFRLLKRRLREILQ
hAPOBEC-3F Homo sapiens
MKPHFRNTVERMYRDTFSYNFYNRPILSRRNTVWLCYEVKTKGPSRPRLDAKIFRGQ
VYSQPEHHAEMCFLSWFCGNQLPAYKCFQITWFVSWTPCPDCVAKLAEFLAEHPNV
TLTISAARLYYYWERDYRRALCRLSQAGARVKIMDDEEFAYCWENFVYSEGQPFMP
WYKFDDNYAFLHRTLKEILRNPMEAMYPHIFYFHFKNLRKAYGRNESWLCFTMEV
VKHHSPVSWKRGVFRNQVDPETHCHAERCFLSWFCDDILSPNTNYEVTWYTSWSPC
PECAGEVAEFLARHSNVNLTIFTARLYYFWDTDYQEGLRSLSQEGASVEIMGYKDFK
YCWENFVYNDDEPFKPWKGLKYNFLFLDSKLQEILE
hAPOBEC-3G Homo sapiens
MKPHFRNTVERMYRDTFSYNFYNRPILSRRNTVWLCYEVKTKGPSRPPLDAKIFRGQ
VYSELKYHPEMRFFHWFSKWRKLHRDQEYEVTWYISWSPCTKCTRDMATFLAEDP
KVTLTIFVARLYYFWDPDYQEALRSLCQKRDGPRATMKIMNYDEFQHCWSKFVYS
QRELFEPWNNLPKYYILLHIMLGEILRHSMDPPTFTFNFNNEPWVRGRHETYLCYEV
ERMHNDTWVLLNQRRGFLCNQAPHKHGFLEGRHAELCFLDVIPFWKLDLDQDYRV
TCFTSWSPCFSCAQEMAKFISKNKHVSLCIFTARIYDDQGRCQEGLRTLAEAGAKISI
MTYSEFKHCWDTFVDHQGCPFQPWDGLDEHSQDLSGRLRAILQNQEN
hAPOBEC-4 Homo sapiens
MEPIYEEYLANHGTIVKPYYWLSFSLDCSNCPYHIRTGEEARVSLTEFCQIFGFPYGTTF
PQTKHLTFYELKTSSGSLVQKGHASSCTGNYIHPESMLFEMNGYLDSAIYNNDSIRHIIL
YSNNSPCNEANHCCISKMYNFLITYPGITLSIYFSQLYHTEMDFPASAWNREALRSLASL
WPRVVLSPISGGIWHSVLHSFISGVSGSHVFQPILTGRALADRHNAYEINAITGVKPYFT
DVLLQTKRNPNTKAQEALESYPLNNAFPGQFFQMPSGQLQPNLPPDLRAPVVFVLVP
LRDLPPMHMGQNPNKPRNIVRHLNMPQMSFQETKDLGRLPTGRSVEIVEITEQFASS
KEADEKKKKKGKK
mAPOBEC-4 Mus musculus
MDSLLMKQKKFLYHFKNVRWAKGRHETYLCYVVKRRDSATSCSLDFGHLRNKSGC
HVELLFLRYISDWDLDPGRCYRVTWFTSWSPCYDCARHVAEFLRWNPNLSLRIFTAR
LYFCEDRKAEPEGLRRLHRAGVQIGIMTFKDYFYCWNTFVENRERTFKAWEGLHEN
SVRLTRQLRRILLPLYEVDDLRDAFRMLGF
rAPOBEC-4 Rattus norvegicus
MEPLYEEYLTHSGTIVKPYYWLSVSLNCTNCPYHIRTGEEARVPYTEFHQTFGFPWS
TYP
QTKHLTFYELRSSSGNLIQKGLASNCTGSHTHPESMLFERDGYLDSLIFHDSNIRHIIL
Y
SNNSPCDEANHCCISKMYNFLMNYPEVTLSVFFSQLYHTENQFPTSAWNREALRGLA
SLWPQVTLSAISGGIWQSILETFVSGISEGLTAVRPFTAGRTLTDRYNAYEINCITEVK
PYFT
DALHSWQKENQDQKVWAASENQPLHNTTPAQWQPDMSQDCRTPAVFMLVPYRDL
PPIHVNPSPQKPRTVVRHLNTLQLSASKVKALRKSPSGRPVKKEEARKGSTRSQEAN
ETNKSKWKKQTLFIKSNICHLLEREQKKIGILSSWSV
mfAPOBEC-4 Macaca fascicularis
MEPTYEEYLANHGTIVKPYYWLSFSLDCSNCPYHIRTGEEARVSLTEFCQIFGFPYGTTY
PQTKHLTFYELKTSSGSLVQKGHASSCTGNYIHPESMLFEMNGYLDSAIYNNDSIRHIIL
YCNNSPCNEANHCCISKVYNFLITYPGITLSIYFSQLYHTEMDFPASAWNREALRSLASL
WPRVVLSPISGGIWHSVLHSFVSGVSGSHVFQPILTGRALTDRYNAYEINAITGVKPFFT
DVLLHTKRNPNTKAQMALESYPLNNAFPGQSFQMTSGIPPDLRAPVVFVLLPLRDLP
PMHMGQDPNKPRNIIRHLNMPQMSFQETKDLERLPTRRSVETVEITERFASSKQAEE
KTKKKKGKK
hAID Homo sapiens
[sequence omitted]
clAID Canis lupus familiaris
MDSLLMKQRKFLYHFKNVRWAKGRHETYLCYVVKRRDSATSFSLDFGHLRNKSGC
HVELLFLRYISDWDLDPGRCYRVTWFTSWSPCYDCARHVADFLRGYPNLSLRIFAAR
LYFCEDRKAEPEGLRRLHRAGVQIAIMTFKDYFYCWNTFVENREKTFKAWEGLHEN
SVRLSRQLRRILLPLYEVDDLRDAFRTLGL
btAID Bos Taurus
MDSLLKKQRQFLYQFKNVRWAKGRHETYLCYVVKRRDSPTSFSLDFGHLRNKAGC
HVELLFLRYISDWDLDPGRCYRVTWFTSWSPCYDCARHVADFLRGYPNLSLRIFTAR
LYFCDKERKAEPEGLRRLHRAGVQIAIMTFKDYFYCWNTFVENHERTFKAWEGLHE
NSVRLSRQLRRILLPLYEVDDLRDAFRTLGL
mAID Mus musculus
[sequence omitted]
pmCDA-1 Petromyzon marinus
MAGYECVRVSEKLDFDTFEFQFENLHYATERHRTYVIFDVKPQSAGGRSRRLWGYII
NNPNVCHAELILMSMIDRHLESNPGVYAMTWYMSWSPCANCSSKLNPWLKNLLEE
QGHTLTMHFSRIYDRDREGDHRGLRGLKHVSNSFRMGVVGRAEVKECLAEYVEAS
RRTLTWLDTTESMAAKMRRKLFCILVRCAGMRESGIPLHLFTLQTPLLSGRVVWWR
V
pmCDA-2 Petromyzon marinus
MELREVVDCALASCVRHEPLSRVAFLRCFAAPSQKPRGTVILFYVEGAGRGVTGGH
AVNYNKQGTSIHAEVLLLSAVRAALLRRRRCEDGEEATRGCTLHCYSTYSPCRDCV
EYIQEFGASTGVRVVIHCCRLYELDVNRRRSEAEGVLRSLSRLGRDFRLMGPRDAIA
LLLGGRLANTADGESGASGNAWVTETNVVEPLVDMTGFGDEDLHAQVQRNKQIRE
AYANYASAVSLMLGELHVDPDKFPFLAEFLAQTSVEPSGTPRETRGRPRGASSRGPEI
GRQRPADFERALGAYGLFLHPRIVSREADREEIKRDLIVVMRKHNYQGP
pmCDA-5 Petromyzon marinus
MAGDENVRVSEKLDFDTFEFQFENLHYATERHRTYVIFDVKPQSAGGRSRRLWGYII
NNPNVCHAELILMSMIDRHLESNPGVYAMTWYMSWSPCANCSSKLNPWLKNLLEE
QGHTLMMHFSRIYDRDREGDHRGLRGLKHVSNSFRMGVVGRAEVKECLAEYVEAS
RRTLTWLDTTESMAAKMRRKLFCILVRCAGMRESGMPLHLFT
yCD Saccharomyces cerevisiae
MVTGGMASKWDQKGMDIAYEEAALGYKEGGVPIGGCLINNKDGSVLGRGHNMRF
QKGSATLHGEISTLENCGRLEGKVYKDTTLYTTLSPCDMCTGAIIMYGIPRCVVGEN
VNFKSKGEKYLQTRGHEVVVVDDERCKKIMKQFIDERPQDWFEDIGE
rAPOBEC-1 (delta 177-186)
MSSETGPVAVDPTLRRRIEPHEFEVFFDPRELRKETCLLYEINWGGRHSIWRHTSQNT
NKHVEVNFIEKFTTERYFCPNTRCSITWFLSWSPCGECSRAITEFLSRYPHVTLFIYIAR
LYHHADPRNRQGLRDLISSGVTIQIMTEQESGYCWRNFVNYSPSNEAHWPRYPHLW
VRGLPPCLNILRRKQPQLTFFTIALQSCHYQRLPPHILWATGLK
rAPOBEC-1 (delta 202-213)
MSSETGPVAVDPTLRRRIEPHEFEVFFDPRELRKETCLLYEINWGGRHSIWRHTSQNT
NKHVEVNFIEKFTTERYFCPNTRCSITWFLSWSPCGECSRAITEFLSRYPHVTLFIYIAR
LYHHADPRNRQGLRDLISSGVTIQIMTEQESGYCWRNFVNYSPSNEAHWPRYPHLW
VRLYVLELYCIILGLPPCLNILRRKQPQHYQRLPPHILWATGLK
Human AID:
[sequence omitted]
(underline: nuclear localization sequence; double underline: nuclear export signal)
Mouse AID:
MDSLLMKQKKFLYHFKNVRWAKGRHETYLCYVVKRRDSATSCSLDFGHLRNKSGCHVELLFL
RYISDWDLDPGRCYRVTWFTSWSPCYDCARHVAEFLRWNPNLSLRIFTARLYFCEDRKAEPE
GLRRLHRAGVQIGIMTFKDYFYCWNTFVENRERTFKAWEGLHENSVRLTRQLRRILLPLYEV
DDLRDAFRMLGF
(underline: nuclear localization sequence; double underline: nuclear export signal)
Canine AID:
MDSLLMKQRKFLYHFKNVRWAKGRHETYLCYVVKRRDSATSFSLDFGHLRNKSGCHVELLFL
RYISDWDLDPGRCYRVTWFTSWSPCYDCARHVADFLRGYPNLSLRIFAARLYFCEDRKAEPE
GLRRLHRAGVQIAIMTFKDYFYCWNTFVENREKTFKAWEGLHENSVRLSRQLRRILLPLYEV
DDLRDAFRTLGL
(underline: nuclear localization sequence; double underline: nuclear export signal)
Bovine AID:
MDSLLKKQRQFLYQFKNVRWAKGRHETYLCYVVKRRDSPTSFSLDFGHLRNKAGCHVELLFL
RYISDWDLDPGRCYRVTWFTSWSPCYDCARHVADFLRGYPNLSLRIFTARLYFCDKERKAEP
EGLRRLHRAGVQIAIMTFKDYFYCWNTFVENHERTFKAWEGLHENSVRLSRQLRRILLPLYE
VDDLRDAFRTLGL
(underline: nuclear localization sequence; double underline: nuclear export signal)
Rat AID
MAVGSKPKAALVGPHWERERIWCFLCSTGLGTQQTGQTSRWLRPAATQDPVSPPRSLLMKQR
KFLYHFKNVRWAKGRHETYLCYVVKRRDSATSFSLDFGYLRNKSGCHVELLFLRYISDWDLD
PGRCYRVTWFTSWSPCYDCARHVADFLRGNPNLSLRIFTARLTGWGALPAGLMSPARPSDYF
YCWNTFVENHERTFKAWEGLHENSVRLSRRLRRILLPLYEVDDLRDAFRTLGL
(underline: nuclear localization sequence; double underline: nuclear export signal)
Mouse APOBEC-3
MGPFCLGCSHRKCYSPIRNLISQETFKFHFKNLGYAKGRKDTFLCYEVTRKDCDSPVSLHHG
VFKNKDNIHAEICFLYWFHDKVLKVLSPREEFKITWYMSWSPCFECAEQIVRFLATHHNLSL
DIFSSRLYNVQDPETQQNLCRLVQEGAQVAAMDLYEFKKCWKKFVDNGGRRFRPWKRLLTNF
RYQDSKLQEILRPCYIPVPSSSSSTLSNICLTKGLPETRFCVEGRRMDPLSEEEFYSQFYNQ
RVKHLCYYHRMKPYLCYQLEQFNGQAPLKGCLLSEKGKQHAEILFLDKIRSMELSQVTITCY
LTWSPCPNCAWQLAAFKRDRPDLILHIYTSRLYFHWKRPFQKGLCSLWQSGILVDVMDLPQF
TDCWTNFVNPKRPFWPWKGLEIISRRTQRRLRRIKESWGLQDLVNDFGNLQLGPPMS
(italic: nucleic acid editing domain)
Rat APOBEC-3:
MGPFCLGCSHRKCYSPIRNLISQETFKFHFKNRLRYAIDRKDTFLCYEVTRKDCDSPVSLHH
GVFKNKDNIHAEICFLYWFHDKVLKVLSPREEFKITWYMSWSPCFECAEQVLRFLATHHNLS
LDIFSSRLYNIRDPENQQNLCRLVQEGAQVAAMDLYEFKKCWKKFVDNGGRRFRPWKKLLTN
FRYQDSKLQEILRPCYIPVPSSSSSTLSNICLTKGLPETRFCVERRRVHLLSEEEFYSQFYN
QRVKHLCYYHGVKPYLCYQLEQFNGQAPLKGCLLSEKGKQHAEILFLDKIRSMELSQVIITC
YLTWSPCPNCAWQLAAFKRDRPDLILHIYTSRLYFHWKRPFQKGLCSLWQSGILVDVMDLPQ
FTDCWTNFVNPKRPFWPWKGLEIISRRTQRRLHRIKESWGLQDLVNDFGNLQLGPPMS
(italic: nucleic acid editing domain)
Rhesus macaque APOBEC-3G:
MVEPMDPRTFVSNFNNRPILSGLNTVWLCCEVKTKDPSGPPLDAKIFQGKVYSKAKYHPEMR
FLRWFHKWRQLHHDQEYKVTWYVSWSPCTRCANSVATFLAKDPKVTLTIFVARLYYFWKPDY
QQALRILCQKRGGPHATMKIMNYNEFQDCWNKFVDGRGKPFKPRNNLPKHYTLLQATLGELL
RHLMDPGTFTSNFNNKPWVSGQHETYLCYKVERLHNDTWVPLNQHRGFLRNQAPNIHGFPKG
RHAELCFLDLIPFWKLDGQQYRVTCFTSWSPCFSCAQEMAKFISNNEHVSLCIFAARIYDDQ
GRYQEGLRALHRDGAKIAMMNYSEFEYCWDTFVDRQGRPFQPWDGLDEHSQALSGRLRAI
(italic: nucleic acid editing domain; underline: cytoplasmic localization signal)
Chimpanzee APOBEC-3G:
MKPHFRNPVERMYQDTFSDNFYNRPILSHRNTVWLCYEVKTKGPSRPPLDAKIFRGQVYSKL
KYHPEMRFFHWFSKWRKLHRDQEYEVTWYISWSPCTKCTRDVATFLAEDPKVTLTIFVARLY
YFWDPDYQEALRSLCQKRDGPRATMKIMNYDEFQHCWSKFVYSQRELFEPWNNLPKYYILLH
IMLGEILRHSMDPPTFTSNFNNELWVRGRHETYLCYEVERLHNDTWVLLNQRRGFLCNQAPH
KHGFLEGRHAELCFLDVIPFWKLDLHQDYRVTCFTSWSPCFSCAQEMAKFISNNKHVSLCIF
AARIYDDQGRCQEGLRTLAKAGAKISIMTYSEFKHCWDTFVDHQGCPFQPWDGLEEHSQALS
GRLRAILQNQGN
(italic: nucleic acid editing domain; underline: cytoplasmic localization signal)
Green monkey APOBEC-3G:
MNPQIRNMVEQMEPDIFVYYFNNRPILSGRNTVWLCYEVKTKDPSGPPLDANIFQGKLYPEA
KDHPEMKFLHWFRKWRQLHRDQEYEVTWYVSWSPCTRCANSVATFLAEDPKVTLTIFVARLY
YFWKPDYQQALRILCQERGGPHATMKIMNYNEFQHCWNEFVDGQGKPFKPRKNLPKHYTLLH
ATLGELLRHVMDPGTFTSNFNNKPWVSGQRETYLCYKVERSHNDTWVLLNQHRGFLRNQAPD
RHGFPKGRHAELCFLDLIPFWKLDDQQYRVTCFTSWSPCFSCAQKMAKFISNNKHVSLCIFA
ARIYDDQGRCQEGLRTLHRDGAKIAVMNYSEFEYCWDTFVDRQGRPFQPWDGLDEHSQALSG
RLRAI
(italic: nucleic acid editing domain; underline: cytoplasmic localization signal)
Human APOBEC-3G:
MKPHFRNTVERMYRDTFSYNFYNRPILSRRNTVWLCYEVKTKGPSRPPLDAKIFRGQVYSEL
KYHPEMRFFHWFSKWRKLHRDQEYEVTWYISWSPCTKCTRDMATFLAEDPKVTLTIFVARLY
YFWDPDYQEALRSLCQKRDGPRATMKIMNYDEFQHCWSKFVYSQRELFEPWNNLPKYYILLH
IMLGEILRHSMDPPTFTFNFNNEPWVRGRHETYLCYEVERMHNDTWVLLNQRRGFLCNQAPH
KHGFLEGRHAELCFLDVIPFWKLDLDQDYRVTCFTSWSPCFSCAQEMAKFISKNKHVSLCIF
TARIYDDQGRCQEGLRTLAEAGAKISIMTYSEFKHCWDTFVDHQGCPFQPWDGLDEHSQDLS
GRLRAILQNQEN
(italic: nucleic acid editing domain; underline: cytoplasmic localization signal)
Human APOBEC-3F:
MKPHFRNTVERMYRDTFSYNFYNRPILSRRNTVWLCYEVKTKGPSRPRLDAKIFRGQVYSQP
EHHAEMCFLSWFCGNQLPAYKCFQITWFVSWTPCPDCVAKLAEFLAEHPNVTLTISAARLYY
YWERDYRRALCRLSQAGARVKIMDDEEFAYCWENFVYSEGQPFMPWYKFDDNYAFLHRTLKE
ILRNPMEAMYPHIFYFHFKNLRKAYGRNESWLCFTMEVVKHHSPVSWKRGVFRNQVDPETHC
HAERCFLSWFCDDILSPNTNYEVTWYTSWSPCPECAGEVAEFLARHSNVNLTIFTARLYYFW
DTDYQEGLRSLSQEGASVEIMGYKDFKYCWENFVYNDDEPFKPWKGLKYNFLFLDSKLQEIL
E
(italic: nucleic acid editing domain)
Human APOBEC-3B:
MNPQIRNPMERMYRDTFYDNFENEPILYGRSYTWLCYEVKIKRGRSNLLWDTGVFRGQVYFK
PQYHAEMCFLSWFCGNQLPAYKCFQITWFVSWTPCPDCVAKLAEFLSEHPNVTLTISAARLY
YYWERDYRRALCRLSQAGARVTIMDYEEFAYCWENFVYNEGQQFMPWYKFDENYAFLHRTLK
EILRYLMDPDTFTFNFNNDPLVLRRRQTYLCYEVERLDNGTWVLMDQHMGFLCNEAKNLLCG
FYGRHAELRFLDLVPSLQLDPAQOYRVTWFISWSPCFSWGCAGEVRAFLQENTHVRLRIFAA
RIYDYDPLYKEALQMLRDAGAQVSIMTYDEFEYCWDTFVYRQGCPFQPWDGLEEHSQALSGR
LRAILQNQGN
(italic: nucleic acid editing domain)
Rat APOBEC-3B:
MQPQGLGPNAGMGPVCLGCSHRRPYSPIRNPLKKLYQQTFYFHFKNVRYAWGRKNNFLCYEV
NGMDCALPVPLRQGVFRKQGHIHAELCFIYWFHDKVLRVLSPMEEFKVTWYMSWSPCSKCAE
QVARFLAAHRNLSLAIFSSRLYYYLRNPNYQQKLCRLIQEGVHVAAMDLPEFKKCWNKFVDN
DGQPFRPWMRLRINFSFYDCKLQEIFSRMNLLREDVFYLQFNNSHRVKPVQNRYYRRKSYLC
YQLERANGQEPLKGYLLYKKGEQHVEILFLEKMRSMELSQVRITCYLTWSPCPNCARQLAAF
KKDHPDLILRIYTSRLYFWRKKFQKGLCTLWRSGIHVDVMDLPQFADCWTNFVNPQRPFRPW
NELEKNSWRIQRRLRRIKESWGL
Bovine APOBEC-3B:
DGWEVAFRSGTVLKAGVLGVSMTEGWAGSGHPGQGACVWTPGTRNTMNLLREVLFKQQFGNQ
PRVPAPYYRRKTYLCYQLKQRNDLTLDRGCFRNKKQRHAERFIDKINSLDLNPSQSYKIICY
ITWSPCPNCANELVNFITRNNHLKLEIFASRLYFHWIKSFKMGLQDLQNAGISVAVMTHTEF
EDCWEQFVDNQSRPFQPWDKLEQYSASIRRRLQRILTAPI
Chimpanzee APOBEC-3B:
MNPQIRNPMEWMYQRTFYYNFENEPILYGRSYTWLCYEVKIRRGHSNLLWDTGVFRGQMYSQ
PEHHAEMCFLSWFCGNQLSAYKCFQITWFVSWTPCPDCVAKLAKFLAEHPNVTLTISAARLY
YYWERDYRRALCRLSQAGARVKIMDDEEFAYCWENFVYNEGQPFMPWYKFDDNYAFLHRTLK
ElIRHLMDPDTFTFNFNNDPLVLRRHQTYLCYEVERLDNGTWVLMDQHMGFLCNEAKNLLCG
FYGRHAELRFLDLVPSLQLDPAQIYRVTWFISWSPCFSWGCAGQVRAFLQENTHVRLRIFAA
RIYDYDPLYKEALQMLRDAGAQVSIMTYDEFEYCWDTFVYRQGCPFQPWDGLEEHSQALSGR
LRAILQVRASSLCMVPHRPPPPPQSPGPCLPLCSEPPLGSLLPTGRPAPSLPFLLTASFSFP
PPASLPPLPSLSLSPGHLPVPSFHSLTSCSIQPPCSSRIRETEGWASVSKEGRDLG
Human APOBEC-3C:
MNPQIRNPMKAMYPGTFYFQFKNLWEANDRNETWLCFTVEGIKRRSVVSWKTGVFRNQVDSE
THCHAERCFLSWFCDDILSPNTKYQVTWYTSWSPCPDCAGEVAEFLARHSNVNLTIFTARLY
YFQYPCYQEGLRSLSQEGVAVEIMDYEDFKYCWENFVYNDNEPFKPWKGLKTNFRLLKRRLR
ESLQ
(italic: nucleic acid editing domain)
Gorilla APOBEC-3C3C
MNPQIRNPMKAMYPGTFYFQFKNLWEANDRNETWLCFTVEGIKRRSVVSWKTGVFRNQVDSE
THCHAERCFLSWECDDILSPNTNYQVTWYTSWSPCPECAGEVAEFLARHSNVNLTIFTARLY
YFQDTDYQEGLRSLSQEGVAVKIMDYKDFKYCWENFVYNDDEPFKPWKGLKYNFRFLKRRLQ
EILE
Human APOBEC-3A:
MEASPASGPRHLMDPHIFTSNFNNGIGRHKTYLCYEVERLDNGTSVKMDQHRGFLHNQAKNL
LCGFYGRHAELRFLDLVPSLQLDPAQIYRVTWFISWSPCFSWGCAGEVRAFLQENTHVRLRI
FAARIYDYDPLYKEALQMLRDAGAQVSIMTYDEFKHCWDTFVDHQGCPFQPWDGLDEHSQAL
SGRLRAILQNQGN
(italic: nucleic acid editing domain)
Rhesus macaque APOBEC-3A:
MDGSPASRPRHLMDPNTFTFNFNNDLSVRGRHQTYLCYEVERLDNGTWVPMDERRGFLCNKA
KNVPCGDYGCHVELRFLCEVPSWQLDPAQTYRVTWFISWSPCFRRGCAGQVRVFLQENKHVR
LRIFAARIYDYDPLYQEALRTLRDAGAQVSIMTYEEFKHCWDTFVDRQGRPFQPWDGLDEHS
QALSGRLRAILQNQGN
(italic: nucleic acid editing domain)
Bovine APOBEC-3A3A:
MDEYTFTENFNNQGWPSKTYLCYEMERLDGDATIPLDEYKGFVRNKGLDQPEKPCHAELYFL
GKIHSWNLDRNQHYRLTCFISWSPCYDCAQKLTTFLKENHHISLHILASRIYTHNRFGCHQS
GLCELQAAGARITIMTFEDFKHCWETFVDHKGKPFQPWEGLNVKSQALCTELQAILKTQQN
(italic: nucleic acid editing domain)
Human APOBEC-3H:
MALLTAETFRLQFNNKRRLRRPYYPRKALLCYQLTPQNGSTPTRGYFENKKKCHAEICFINE
IKSMGLDETQCYQVTCYLTWSPCSSCAWELVDFIKAHDHLNLGIFASRLYYHWCKPQQKGLR
LLCGSQVPVEVMGFPKFADCWENFVDHEKPLSFNPYKMLEELDKNSRAIKRRLERIKIPGVR
AQGRYMDILCDAEV
(italic: nucleic acid editing domain)
Rhesus macaque APOBEC-3H:
MALLTAKTFSLQFNNKRRVNKPYYPRKALLCYQLTPQNGSTPTRGHLKNKKKDHAEIRFINK
IKSMGLDETQCYQVTCYLTWSPCPSCAGELVDFIKAHRHLNLRIFASRLYYHWRPNYQEGLL
LLCGSQVPVEVMGLPEFTDCWENFVDHKEPPSFNPSEKLEELDKNSQAIKRRLERIKSRSVD
VLENGLRSLQLGPVTPSSSIRNSR
Human APOBEC-3D:
MNPQIRNPMERMYRDTFYDNFENEPILYGRSYTWLCYEVKIKRGRSNLLWDTGVFRGPVLPK
RQSNHRQEVYFRFENHAEMCFLSWFCGNRLPANRRFQITWFVSWNPCLPCVVKVTKFLAEHP
NVTLTISAARLYYYRDRDWRWVLLRLHKAGARVKIMDYEDFAYCWENFVCNEGQPFMPWYKF
DDNYASLHRTLKEILRNPMEAMYPHIFYFHFKNLLKACGRNESWLCFTMEVTKHHSAVFRKR
GVFRNQVDPETHCHAERCFLSWFCDDILSPNTNYEVTWYTSWSPCPECAGEVAEFLARHSNV
NLTIFTARLCYFWDTDYQEGLCSLSQEGASVKIMGYKDFVSCWKNFVYSDDEPFKPWKGLQT
NFRLLKRRLREILQ
(italic: nucleic acid editing domain)
Human APOBEC-1:
MTSEKGPSTGDPTLRRRIEPWEFDVFYDPRELRKEACLLYEIKWGMSRKIWRSSGKNTTNHV
EVNFIKKFTSERDFHPSMSCSITWFLSWSPCWECSQAIREFLSRHPGVTLVIYVARLFWHMD
QQNRQGLRDLVNSGVTIQIMRASEYYHCWRNFVNYPPGDEAHWPQYPPLWMMLYALELHCII
LSLPPCLKISRRWQNHLTFFRLHLQNCHYQTIPPHILLATGLIHPSVAWR
Mouse APOBEC-1:
MSSETGPVAVDPTLRRRIEPHEFEVFFDPRELRKETCLLYEINWGGRHSVWRHTSQNTSNHV
EVNFLEKFTTERYFRPNTRCSITWFLSWSPCGECSRAITEFLSRHPYVTLFIYIARLYHHTD
QRNRQGLRDLISSGVTIQIMTEQEYCYCWRNFVNYPPSNEAYWPRYPHLWVKLYVLELYCII
LGLPPCLKILRRKQPQLTFFTITLQTCHYQRIPPHLLWATGLK
Rat APOBEC-1:
[sequence omitted]
Human APOBEC-2:
MAQKEEAAVATEAASQNGEDLENLDDPEKLKELIELPPFEIVTGERLPANFFKFQFRNVEYS
SGRNKTFLCYVVEAQGKGGQVQASRGYLEDEHAAAHAEEAFFNTILPAFDPALRYNVTWYVS
SSPCAACADRIIKTLSKTKNLRLLILVGRLFMWEEPEIQAALKKLKEAGCKLRIMKPQDFEY
VWQNFVEQEEGESKAFQPWEDIQENFLYYEEKLADILK
Mouse APOBEC-2:
MAQKEEAAEAAAPASQNGDDLENLEDPEKLKELIDLPPFEIVTGVRLPVNFFKFQFRNVEYS
SGRNKTFLCYVVEVQSKGGQAQATQGYLEDEHAGAHAEEAFFNTILPAFDPALKYNVTWYVS
SSPCAACADRILKTLSKTKNLRLLILVSRLFMWEEPEVQAALKKLKEAGCKLRIMKPQDFEY
IWQNFVEQEEGESKAFEPWEDIQENFLYYEEKLADILK
Rat APOBEC-2:
MAQKEEAAEAAAPASQNGDDLENLEDPEKLKELIDLPPFEIVTGVRLPVNFFKFQFRNVEYS
SGRNKTFLCYVVEAQSKGGQVQATQGYLEDEHAGAHAEEAFFNTILPAFDPALKYNVTWYVS
SSPCAACADRILKTLSKTKNLRLLILVSRLFMWEEPEVQAALKKLKEAGCKLRIMKPQDFEY
LWQNFVEQEEGESKAFEPWEDIQENFLYYEEKLADILK
Bovine APOBEC-2:
MAQKEEAAAAAEPASQNGEEVENLEDPEKLKELIELPPFEIVTGERLPAHYFKFQFRNVEYS
SGRNKTFLCYVVEAQSKGGQVQASRGYLEDEHATNHAEEAFFNSIMPTFDPALRYMVTWYVS
SSPCAACADRIVKTLNKTKNLRLLILVGRLFMWEEPEIQAALRKLKEAGCRLRIMKPQDFEY
IWQNFVEQEEGESKAFEPWEDIQENFLYYEEKLADILK
Petromyzon marinus CDA1 (pmCDA1)
MTDAEYVRIHEKLDIYTFKKQFFNNKKSVSHRCYVLFELKRRGERRACFWGYAVNKPQSGTE
RGIHAEIFSIRKVEEYLRDNPGQFTINWYSSWSPCADCAEKILEWYNQELRGNGHTLKIWAC
KLYYEKNARNQIGLWNLRDNGVGLNVMVSEHYQCCRKIFIQSSHNQLNENRWLEKTLKRAEK
RRSELSFMIQVKILHTTKSPAV
Human APOBEC3G chain A
MDPPTFTFNFNNEPWWGRHETYLCYEVERMHNDTWVLLNQRRGFLCNQAPHKHGFLEGRHAE
LCFLDVIPFWKLDLDQDYRVTCFTSWSPCFSCAQEMAKFISKNKHVSLCIFTARIYDDQGRC
QEGLRTLAEAGAKISFTYSEFKHCWDTFVDHQGCPFQPWDGLDEHSQDLSGRLRAILQ

[0614] Other exemplary deaminases that can be internally fused within the amino acid sequence of a Cas12 according to aspects of this disclosure are provided below. It should be understood that, in some embodiments, the active domain of the respective sequence can be used, e.g., the domain without a localizing signal (e.g., a nuclear localization sequence, a nuclear export signal, or a cytoplasmic localizing signal).

[0615] Details of C to T nucleobase editing proteins are described in International PCT Application No. PCT/US2016/058344 (WO 2017/070632) and Komor, A. C., et al., “Programmable editing of a target base in genomic DNA without double-stranded DNA cleavage” Nature 533, 420-424 (2016), the entire contents of which are hereby incorporated by reference.

### Cytidine Deaminase

[0616] In one embodiment, a fusion protein of the invention comprises a cytidine deaminase. In some embodiments, the cytidine deaminases provided herein are capable of deaminating cytosine or 5-methylcytosine to uracil or thymine. In some embodiments, the cytosine deaminases provided herein are capable of deaminating cytosine in DNA. The cytidine deaminase may be derived from any suitable organism. In some embodiments, the cytidine deaminase is from a prokaryote. In some embodiments, the cytidine deaminase is from a bacterium. In some embodiments, the cytidine deaminase is from a mammal (e.g., human).

[0617] In some embodiments, the cytidine deaminase comprises an amino acid sequence that is at least 60%, at least 65%, at least 70%, at least 75%, at least 80%, at least 85%, at least 90%, at least 95%, at least 96%, at least 97%, at least 98%, at least 99%, or at least 99.5% identical to any one of the cytidine deaminase amino acid sequences set forth herein.

[0618] A fusion protein of the invention comprises a nucleic acid editing domain. In some embodiments, the nucleic acid editing domain can catalyze a C to U base change. In some embodiments, the nucleic acid editing domain is a deaminase domain. In some embodiments, the deaminase is a cytidine deaminase or an adenosine deaminase. In some embodiments, the deaminase is an apolipoprotein B mRNA-editing complex (APOBEC) family deaminase. In some embodiments, the deaminase is an APOBECl deaminase. In some embodiments, the deaminase is an APOBEC2 deaminase. In some embodiments, the deaminase is an APOBEC3 deaminase. In some embodiments, the deaminase is an APOBEC3 A deaminase. In some embodiments, the deaminase is an APOBEC3B deaminase. In some embodiments, the deaminase is an APOBEC3C deaminase. In some embodiments, the deaminase is an APOBEC3D deaminase. In some embodiments, the deaminase is an APOBEC3E deaminase. In some embodiments, the deaminase is an APOBEC3F deaminase. In some embodiments, the deaminase is an APOBEC3G deaminase. In some embodiments, the deaminase is an APOBEC3H deaminase. In some embodiments, the deaminase is an APOBEC4 deaminase. In some embodiments, the deaminase is an activation-induced deaminase (AID). In some embodiments, the deaminase is a vertebrate deaminase. In some embodiments, the deaminase is an invertebrate deaminase. In some embodiments, the deaminase is a human, chimpanzee, gorilla, monkey, cow, dog, rat, or mouse deaminase. In some embodiments, the deaminase is a human deaminase. In some embodiments, the deaminase is a rat deaminase, e.g., rAPOBECl. In some embodiments, the deaminase is a Petromyzon marinus cytidine deaminase 1 (pmCDAl). In some embodiments, the deaminase is a human APOBEC3G. In some embodiments, the deaminase is a fragment of the human APOBEC3G. In some embodiments, the nucleic acid editing domain is at least 80%, at least 85%, at least 90%, at least 92%, at least 95%, at least 96%, at least 97%, at least 98%, at least 99⁰/), or at least 99.5% identical to the deaminase domain of any deaminase described herein.

### Additional Domains

[0619] A base editor described herein can include any domain which helps to facilitate the nucleobase editing, modification or altering of a nucleobase of a polynucleotide. In some embodiments, a base editor comprises a polynucleotide programmable nucleotide binding domain (e.g., Cas9), a nucleobase editing domain (e.g., deaminase domain), and one or more additional domains. In some embodiments, the additional domain can facilitate enzymatic or catalytic functions of the base editor, binding functions of the base editor, or be inhibitors of cellular machinery (e.g., enzymes) that could interfere with the desired base editing result. In some embodiments, a base editor can comprise a nuclease, a nickase, a recombinase, a deaminase, a methyltransferase, a methylase, an acetylase, an acetyltransferase, a transcriptional activator, or a transcriptional repressor domain.

[0620] In some embodiments, a base editor can comprise an uracil glycosylase inhibitor (UGI) domain. A UGI domain can for example improve the efficiency of base editors comprising a cytidine deaminase domain by inhibiting the conversion of a U formed by deamination of a C back to the C nucleobase. In some embodiments, cellular DNA repair response to the presence of U:G heteroduplex DNA can be responsible for a decrease in nucleobase editing efficiency in cells. In such embodiments, uracil DNA glycosylase (UDG) can catalyze removal of U from DNA in cells, which can initiate base excision repair (BER), mostly resulting in reversion of the U:G pair to a C:G pair. In such embodiments, BER can be inhibited in base editors comprising one or more domains that bind the single strand, block the edited base, inhibit UGI, inhibit BER, protect the edited base, and/or promote repairing of the non-edited strand. Thus, this disclosure contemplates a base editor fusion protein comprising a UGI domain.

[0621] In some embodiments, a base editor comprises as a domain all or a portion of a double-strand break (DSB) binding protein. For example, a DSB binding protein can include a Gam protein of bacteriophage Mu that can bind to the ends of DSBs and can protect them from degradation. See Komor, A. C., et al., “Improved base excision repair inhibition and bacteriophage Mu Gam protein yields C:G-to-T:A base editors with higher efficiency and product purity” Science Advances 3:eaao4774 (2017), the entire content of which is hereby incorporated by reference.

[0622] Additionally, in some embodiments, a Gam protein can be fused to an N terminus of a base editor. In some embodiments, a Gam protein can be fused to a C-terminus of a base editor. The Gam protein of bacteriophage Mu can bind to the ends of double strand breaks (DSBs) and protect them from degradation. In some embodiments, using Gam to bind the free ends of DSB can reduce indel formation during the process of base editing. In some embodiments, 174-residue Gam protein is fused to the N terminus of the base editors. See. Komor, A. C., et al., “Improved base excision repair inhibition and bacteriophage Mu Gam protein yields C:G-to-T:A base editors with higher efficiency and product purity” Science Advances 3:eaao4774 (2017). In some embodiments, a mutation or mutations can change the length of a base editor domain relative to a wild-type domain. For example, a deletion of at least one amino acid in at least one domain can reduce the length of the base editor. In another case, a mutation or mutations do not change the length of a domain relative to a wild-type domain. For example, substitution(s) in any domain does/do not change the length of the base editor.

[0623] In some embodiments, a base editor can comprise as a domain all or a portion of a nucleic acid polymerase (NAP). For example, a base editor can comprise all or a portion of a eukaryotic NAP. In some embodiments, a NAP or portion thereof incorporated into a base editor is a DNA polymerase. In some embodiments, a NAP or portion thereof incorporated into a base editor has translesion polymerase activity. In some embodiments, a NAP or portion thereof incorporated into a base editor is a translesion DNA polymerase. In some embodiments, a NAP or portion thereof incorporated into a base editor is a Rev7, Rev1 complex, polymerase iota, polymerase kappa, or polymerase eta. In some embodiments, a NAP or portion thereof incorporated into a base editor is a eukaryotic polymerase alpha, beta, gamma, delta, epsilon, gamma, eta, iota, kappa, lambda, mu, or nu component. In some embodiments, a NAP or portion thereof incorporated into a base editor comprises an amino acid sequence that is at least 75%, 80%, 85%, 90%, 95%, 96%, 97%, 98%, 99%, or 99.5% identical to a nucleic acid polymerase (e.g., a translesion DNA polymerase).

### Other Nucleobase Editors

[0624] The invention provides for a modular multi-effector nucleobase editor wherein virtually any nucleobase editor known in the art can be inserted into the fusion protein described herein or swapped in for a cytidine deaminase or adenosine deaminase. In one embodiment, the invention features a multi-effector nucleobase editor comprising an abasic nucleobase editor domain. Abasic nucleobase editors are known in the art and described, for example, by Kavli et al., EMBO J. 15:3442-3447, 1996, which is incorporated herein by reference.

[0625] In one embodiment, a multi-effector nucleobase editor comprises the following domains A-C, A-D, or A-E:
[0626] NH₂-[A-B-C]-COOH,
[0627] NH₂-[A-B-C-D]-COOH, or
[0628] NH₂-[A-B-C-D-E]-COOH
   wherein A and C or A, C, and E, each comprises one or more of the following: an adenosine deaminase domain or an active fragment thereof, a cytidine deaminase domain or an active fragment thereof, a DNA glycosylase domain or an active fragment thereof, and where B or B and D, each comprises one or more domains having nucleic acid sequence specific binding activity.

[0629] In one embodiment, a multi-effector nucleobase editor comprises NH₂-[Aₙ-Bₒ-Cₙ]-COOH,
[0630] NH₂-[Aₙ-Bₒ-Cₙ-Dₒ]-COOH, or
[0631] NH2-[Aₙ-Bₒ-Cₚ-Dₒ-Eq]-COOH;
   wherein A and C or A, C, and E, each comprises one or more of the following: an adenosine deaminase domain or an active fragment thereof, a cytidine deaminase domain or an active fragment thereof, and a DNA glycosylase domain or an active fragment thereof, and where n is an integer: 1, 2, 3, 4, or 5, and where p is an integer: 0, 1, 2, 3, 4, or 5; and B or B and D each comprises a domain having nucleic acid sequence specific binding activity; and wherein o is an integer: 1, 2, 3, 4, or 5.

[0632] The domains of the base editor disclosed herein can be arranged in any order. Non-limiting examples of a base editor comprising a fusion protein comprising e.g., a polynucleotide-programmable nucleotide-binding domain and a deaminase domain can be arranged as following:
[0633] NH₂-[nucleobase editing domain]-Linker1-[e.g., Cas9 derived domain]-COOH;
[0634] NH₂-[e.g., cytidine deaminase]-Linker1-[e.g., Cas9 derived domain]-COOH;
[0635] NH₂-[e.g., cytidine deaminase]-Linker1-[e.g., Cas9 derived domain]-Linker2-[UGI]-COOH;
[0636] NH₂-[e.g., APOBEC]-Linker1-[e.g., Cas9 derived domain]-COOH;
[0637] NH₂-[e.g., cytidine deaminase]-Linker1-[e.g., Cas9 derived domain]-COOH;
[0638] NH₂-[e.g., APOBEC]-Linker1-[e.g., Cas9 derived domain]-COOH;
[0639] NH₂-[e.g., APOBEC]-Linker1-[e.g., Cas9 derived domain]-Linker2-[UGI]-COOH
[0640] NH₂-[e.g., adenosine deaminase]-[e.g., Cas9 derived domain]-COOH;
[0641] NH₂-[e.g., Cas9 derived domain]-[e.g., adenosine deaminase]-COOH;
[0642] NH₂-[e.g., adenosine deaminase]-[e.g., Cas9 derived domain]-[inosine BER inhibitor]-COOH;
[0643] NH₂-[e.g., adenosine deaminase]-[inosine BER inhibitor]-[e.g., Cas9 derived domain]-COOH;
[0644] NH₂-[inosine BER inhibitor]-[e.g., adenosine deaminase]-[e.g., Cas9 derived domain]-COOH;
[0645] NH₂-[e.g., Cas9 derived domain]-[e.g., adenosine deaminase]-[inosine BER inhibitor]-COOH;
[0646] NH₂-[e.g., Cas9 derived domain]-[inosine BER inhibitor]-[e.g., adenosine deaminase]-COOH; or
[0647] NH₂-[inosine BER inhibitor]-[e.g., Cas9 derived domain]-[e.g., adenosine deaminase]-COOH.

[0648] Additionally, in some cases, a Gam protein can be fused to an N terminus of a base editor. In some cases, a Gam protein can be fused to a C-terminus of a base editor. The Gam protein of bacteriophage Mu can bind to the ends of double strand breaks (DSBs) and protect them from degradation. In some embodiments, using Gam to bind the free ends of DSB can reduce indel formation during the process of base editing. In some embodiments, 174-residue Gam protein is fused to the N terminus of the base editors. See. Komor, A. C., et al., “Improved base excision repair inhibition and bacteriophage Mu Gam protein yields C:G-to-T:A base editors with higher efficiency and product purity” Science Advances 3:eaao4774 (2017). In some cases, a mutation or mutations can change the length of a base editor domain relative to a wild type domain. For example, a deletion of at least one amino acid in at least one domain can reduce the length of the base editor. In another case, a mutation or mutations do not change the length of a domain relative to a wild type domain. For example, substitution(s) in any domain does/do not change the length of the base editor. Non-limiting examples of such base editors, where the length of all the domains is the same as the wild type domains, can include:
[0649] NH₂-[APOBEC1]-Linker1-[Cas9(D10A)]-Linker2-[UGI]-COOH;
[0650] NH₂-[CDA1]-Linker1-[Cas9(D10A)]-Linker2-[UGI]-COOH;
[0651] NH₂-[AID]-Linker1-[Cas9(D10A)]-Linker2-[UGI]-COOH;
[0652] NH₂-[APOBEC1]-Linker1-[Cas9(D10A)]-Linker2-[SSB]-COOH;
[0653] NH₂-[UGI]-Linker1-[ABOBEC1]-Linker2-[Cas9(D10A)]-COOH;
[0654] NH₂-[APOBEC1]-Linker1-[Cas9(D10A)]-Linker2-[UGI]-Linker3-[UGI]-COOH;
[0655] NH₂-[Cas9(D10A)]-Linker1-[CDA1]-Linker2-[UGI]-COOH;
[0656] NH₂-[Gam]-Linker1-[APOBEC1]-Linker2-[Cas9(D10A)]-Linker3-[UGI]-COOH;
[0657] NH₂-[Gam]-Linker1-[APOBEC1]-Linker2-[Cas9(D10A)]-Linker3-[UGI]-Linker4-[UGI]-COOH;
[0658] NH₂-[APOBEC1]-Linker1-[dCas9(D10A, H840A)]-Linker2-[UGI]-COOH; or
[0659] NH₂-[APOBEC1]-Linker1-[dCas9(D10A, H840A)]-COOH

### Base Editor System

[0660] Use of the base editor system provided herein comprises the steps of: (a) contacting a target nucleotide sequence of a polynucleotide (e.g., double-stranded DNA or RNA or single-stranded DNA or RNA) of a subject with a base editor system comprising a nucleobase editor (e.g., an adenosine base editor) and a guide polynucleic acid (e.g., gRNA), wherein the target nucleotide sequence comprises a targeted nucleobase pair; (b) inducing strand separation of said target region; (c) converting a first nucleobase of said target nucleobase pair in a single strand of the target region to a second nucleobase; and (d) cutting no more than one strand of said target region, where a third nucleobase complementary to the first nucleobase base is replaced by a fourth nucleobase complementary to the second nucleobase. It should be appreciated that in some embodiments, step (b) is omitted. In some embodiments, said targeted nucleobase pair is a plurality of nucleobase pairs in one or more genes. In some embodiments, the base editor system provided herein is capable of multiplex editing of a plurality of nucleobase pairs in one or more genes. In some embodiments, the plurality of nucleobase pairs is located in the same gene. In some embodiments, the plurality of nucleobase pairs is located in one or more genes, wherein at least one gene is located in a different locus.

[0661] In some embodiments, the cut single strand (nicked strand) is hybridized to the guide nucleic acid. In some embodiments, the cut single strand is opposite to the strand comprising the first nucleobase. In some embodiments, the base editor comprises a Cas9 domain. In some embodiments, the first base is adenine, and the second base is not a G, C, A, or T. In some embodiments, the second base is inosine.

[0662] Provided herein are systems, compositions, and methods for editing a nucleobase using a base editor system. In some embodiments, the base editor system comprises (1) a base editor (BE) comprising a polynucleotide programmable nucleotide binding domain and a nucleobase editing domain (e.g., a deaminase domain) for editing the nucleobase; and (2) a guide polynucleotide (e.g., guide RNA) in conjunction with the polynucleotide programmable nucleotide binding domain. In some embodiments, the base editor system comprises an adenosine base editor (ABE). In some embodiments, the base editor system comprises a cytidine base editor (CBE). In some embodiments, the polynucleotide programmable nucleotide binding domain is a polynucleotide programmable DNA binding domain. In some embodiments, the polynucleotide programmable nucleotide binding domain is a polynucleotide programmable RNA binding domain. In some embodiments, the nucleobase editing domain is a deaminase domain. In some embodiments, a deaminase domain can be an adenine deaminase or an adenosine deaminase. In some embodiments, the adenosine base editor can deaminate adenine in DNA. In some embodiments, ABE comprises an evolved TadA variant. In some embodiments, a deaminase domain can be a cytosine deaminase or a cytidine deaminase. In some embodiments, the terms “cytosine deaminase” and “cytidine deaminase” can be used interchangeably.

[0663] Details of nucleobase editing proteins are described in International PCT Application Nos. PCT/2017/045381 (WO2018/027078) and PCT/US2016/058344 (WO2017/070632), each of which is incorporated herein by reference for its entirety. Also see Komor, A. C., et al., “Programmable editing of a target base in genomic DNA without double-stranded DNA cleavage” Nature 533, 420-424 (2016); Gaudelli, N. M., et al., “Programmable base editing of A⋅T to G⋅C in genomic DNA without DNA cleavage” Nature 551, 464-471 (2017); and Komor, A. C., et al., “Improved base excision repair inhibition and bacteriophage Mu Gam protein yields C:G-to-T:A base editors with higher efficiency and product purity” Science Advances 3:eaao4774 (2017), the entire contents of which are hereby incorporated by reference.

[0664] In some embodiments, a single guide polynucleotide may be utilized to target a deaminase to a target nucleic acid sequence. In some embodiments, a single pair of guide polynucleotides may be utilized to target different deaminases to a target nucleic acid sequence.

[0665] The nucleobase components and the polynucleotide programmable nucleotide binding component of a base editor system may be associated with each other covalently or non-covalently. For example, in some embodiments, the deaminase domain can be targeted to a target nucleotide sequence by a polynucleotide programmable nucleotide binding domain. In some embodiments, a polynucleotide programmable nucleotide binding domain can be fused or linked to a deaminase domain. In some embodiments, a polynucleotide programmable nucleotide binding domain can target a deaminase domain to a target nucleotide sequence by non-covalently interacting with or associating with the deaminase domain. For example, in some embodiments, the nucleobase editing component, e.g., the deaminase component can comprise an additional heterologous portion or domain that is capable of interacting with, associating with, or capable of forming a complex with an additional heterologous portion or domain that is part of a polynucleotide programmable nucleotide binding domain. In some embodiments, the additional heterologous portion may be capable of binding to, interacting with, associating with, or forming a complex with a polypeptide. In some embodiments, the additional heterologous portion may be capable of binding to, interacting with, associating with, or forming a complex with a polynucleotide. In some embodiments, the additional heterologous portion may be capable of binding to a guide polynucleotide. In some embodiments, the additional heterologous portion may be capable of binding to a polypeptide linker. In some embodiments, the additional heterologous portion may be capable of binding to a polynucleotide linker. The additional heterologous portion may be a protein domain. In some embodiments, the additional heterologous portion may be a K Homology (KH) domain, a MS2 coat protein domain, a PP7 coat protein domain, a SfMu Com coat protein domain, a steril alpha motif, a telomerase Ku binding motif and Ku protein, a telomerase Sm7 binding motif and Sm7 protein, or an RNA recognition motif.

[0666] A base editor system may further comprise a guide polynucleotide component. It should be appreciated that components of the base editor system may be associated with each other via covalent bonds, noncovalent interactions, or any combination of associations and interactions thereof. In some embodiments, a deaminase domain can be targeted to a target nucleotide sequence by a guide polynucleotide. For example, in some embodiments, the nucleobase editing component of the base editor system, e.g., the deaminase component, can comprise an additional heterologous portion or domain (e.g., polynucleotide binding domain such as an RNA or DNA binding protein) that is capable of interacting with, associating with, or capable of forming a complex with a portion or segment (e.g., a polynucleotide motif) of a guide polynucleotide. In some embodiments, the additional heterologous portion or domain (e.g., polynucleotide binding domain such as an RNA or DNA binding protein) can be fused or linked to the deaminase domain. In some embodiments, the additional heterologous portion may be capable of binding to, interacting with, associating with, or forming a complex with a polypeptide. In some embodiments, the additional heterologous portion may be capable of binding to, interacting with, associating with, or forming a complex with a polynucleotide. In some embodiments, the additional heterologous portion may be capable of binding to a guide polynucleotide. In some embodiments, the additional heterologous portion may be capable of binding to a polypeptide linker. In some embodiments, the additional heterologous portion may be capable of binding to a polynucleotide linker. The additional heterologous portion may be a protein domain. In some embodiments, the additional heterologous portion may be a K Homology (KH) domain, a MS2 coat protein domain, a PP7 coat protein domain, a SfMu Com coat protein domain, a sterile alpha motif, a telomerase Ku binding motif and Ku protein, a telomerase Sm7 binding motif and Sm7 protein, or an RNA recognition motif.

[0667] In some embodiments, a base editor system can further comprise an inhibitor of base excision repair (BER) component. It should be appreciated that components of the base editor system may be associated with each other via covalent bonds, noncovalent interactions, or any combination of associations and interactions thereof. The inhibitor of BER component may comprise a base excision repair inhibitor. In some embodiments, the inhibitor of base excision repair can be a uracil DNA glycosylase inhibitor (UGI). In some embodiments, the inhibitor of base excision repair can be an inosine base excision repair inhibitor. In some embodiments, the inhibitor of base excision repair can be targeted to the target nucleotide sequence by the polynucleotide programmable nucleotide binding domain. In some embodiments, a polynucleotide programmable nucleotide binding domain can be fused or linked to an inhibitor of base excision repair. In some embodiments, a polynucleotide programmable nucleotide binding domain can be fused or linked to a deaminase domain and an inhibitor of base excision repair. In some embodiments, a polynucleotide programmable nucleotide binding domain can target an inhibitor of base excision repair to a target nucleotide sequence by non-covalently interacting with or associating with the inhibitor of base excision repair. For example, in some embodiments, the inhibitor of base excision repair component can comprise an additional heterologous portion or domain that is capable of interacting with, associating with, or capable of forming a complex with an additional heterologous portion or domain that is part of a polynucleotide programmable nucleotide binding domain. In some embodiments, the inhibitor of base excision repair can be targeted to the target nucleotide sequence by the guide polynucleotide. For example, in some embodiments, the inhibitor of base excision repair can comprise an additional heterologous portion or domain (e.g., polynucleotide binding domain such as an RNA or DNA binding protein) that is capable of interacting with, associating with, or capable of forming a complex with a portion or segment (e.g., a polynucleotide motif) of a guide polynucleotide. In some embodiments, the additional heterologous portion or domain of the guide polynucleotide (e.g., polynucleotide binding domain such as an RNA or DNA binding protein) can be fused or linked to the inhibitor of base excision repair. In some embodiments, the additional heterologous portion may be capable of binding to, interacting with, associating with, or forming a complex with a polynucleotide. In some embodiments, the additional heterologous portion may be capable of binding to a guide polynucleotide. In some embodiments, the additional heterologous portion may be capable of binding to a polypeptide linker. In some embodiments, the additional heterologous portion may be capable of binding to a polynucleotide linker. The additional heterologous portion may be a protein domain. In some embodiments, the additional heterologous portion may be a K Homology (KH) domain, a MS2 coat protein domain, a PP7 coat protein domain, a SfMu Com coat protein domain, a sterile alpha motif, a telomerase Ku binding motif and Ku protein, a telomerase Sm7 binding motif and Sm7 protein, or an RNA recognition motif.

[0668] In some embodiments, the base editor inhibits base excision repair (BER) of the edited strand. In some embodiments, the base editor protects or binds the non-edited strand. In some embodiments, the base editor comprises UGI activity. In some embodiments, the base editor comprises a catalytically inactive inosine-specific nuclease. In some embodiments, the base editor comprises nickase activity. In some embodiments, the intended edit of base pair is upstream of a PAM site. In some embodiments, the intended edit of base pair is 1, 2, 3, 4, 5, 6, 7, 8, 9, 10, 11, 12, 13, 14, 15, 16, 17, 18, 19, or 20 nucleotides upstream of the PAM site. In some embodiments, the intended edit of base-pair is downstream of a PAM site. In some embodiments, the intended edited base pair is 1, 2, 3, 4, 5, 6, 7, 8, 9, 10, 11, 12, 13, 14, 15, 16, 17, 18, 19, or 20 nucleotides downstream stream of the PAM site.

[0669] In some embodiments, the method does not require a canonical (e.g., NGG) PAM site. In some embodiments, the nucleobase editor comprises a linker or a spacer. In some embodiments, the linker or spacer is 1-25 amino acids in length. In some embodiments, the linker or spacer is 5-20 amino acids in length. In some embodiments, the linker or spacer is 10, 11, 12, 13, 14, 15, 16, 17, 18, 19, or 20 amino acids in length.

[0670] In some embodiments, the base editing fusion proteins provided herein need to be positioned at a precise location, for example, where a target base is placed within a defined region (e.g., a “deamination window”). In some embodiments, a target can be within a 4 base region. In some embodiments, such a defined target region can be approximately 15 bases upstream of the PAM. See Komor, A. C., et al., “Programmable editing of a target base in genomic DNA without double-stranded DNA cleavage” Nature 533, 420-424 (2016); Gaudelli, N. M., et al., “Programmable base editing of A⋅T to G⋅C in genomic DNA without DNA cleavage” Nature 551, 464-471 (2017); and Komor, A. C., et al., “Improved base excision repair inhibition and bacteriophage Mu Gam protein yields C:G-to-T:A base editors with higher efficiency and product purity” Science Advances 3:eaao4774 (2017), the entire contents of which are hereby incorporated by reference.

[0671] In some embodiments, the target region comprises a target window, wherein the target window comprises the target nucleobase pair. In some embodiments, the target window comprises 1-10 nucleotides. In some embodiments, the target window is 1, 2, 3, 4, 5, 6, 7, 8, 9, 10, 11, 12, 13, 14, 15, 16, 17, 18, 19, or 20 nucleotides in length. In some embodiments, the intended edit of base pair is within the target window. In some embodiments, the target window comprises the intended edit of base pair. In some embodiments, the method is performed using any of the base editors provided herein. In some embodiments, a target window is a deamination window. A deamination window can be the defined region in which a base editor acts upon and deaminates a target nucleotide. In some embodiments, the deamination window is within a 2, 3, 4, 5, 6, 7, 8, 9, or 10 base regions. In some embodiments, the deamination window is 5, 6, 7, 8, 9, 10, 11, 12, 13, 14, 15, 16, 17, 18, 19, 20, 21, 22, 23, 24, or 25 bases upstream of the PAM.

[0672] The base editors of the present disclosure can comprise any domain, feature or amino acid sequence which facilitates the editing of a target polynucleotide sequence. For example, in some embodiments, the base editor comprises a nuclear localization sequence (NLS). In some embodiments, an NLS of the base editor is localized between a deaminase domain and a polynucleotide programmable nucleotide binding domain. In some embodiments, an NLS of the base editor is localized C-terminal to a polynucleotide programmable nucleotide binding domain.

[0673] Other exemplary features that can be present in a base editor as disclosed herein are localization sequences, such as cytoplasmic localization sequences, export sequences, such as nuclear export sequences, or other localization sequences, as well as sequence tags that are useful for solubilization, purification, or detection of the fusion proteins. Suitable protein tags provided herein include, but are not limited to, biotin carboxylase carrier protein (BCCP) tags, myc-tags, calmodulin-tags, FLAG-tags, hemagglutinin (HA)-tags, polyhistidine tags, also referred to as histidine tags or His-tags, maltose binding protein (MBP)-tags, nus-tags, glutathione-S-transferase (GST)-tags, green fluorescent protein (GFP)-tags, thioredoxin-tags, S-tags, Softags (e.g., Softag 1, Softag 3), strep-tags, biotin ligase tags, FlAsH tags, V5 tags, and SBP-tags. Additional suitable sequences will be apparent to those of skill in the art. In some embodiments, the fusion protein comprises one or more His tags.

[0674] Non-limiting examples of protein domains which can be included in the fusion protein include deaminase domains (e.g., cytidine deaminase, adenosine deaminase), a uracil glycosylase inhibitor (UGI) domain, epitope tags, and reporter gene sequences, and/or protein domains having one or more of the following activities: methylase activity, demethylase activity, transcription activation activity, transcription repression activity, transcription release factor activity, histone modification activity, RNA cleavage activity, and nucleic acid binding activity. Additional domains can be a heterologous functional domain. Such heterologous functional domains can confer a function activity, such as DNA methylation, DNA damage, DNA repair, modification of a target polypeptide associated with target DNA (e.g., a histone, a DNA-binding protein, etc.), leading to, for example, histone methylation, histone acetylation, histone ubiquitination, and the like.

[0675] Other functions conferred can include methyltransferase activity, demethylase activity, deamination activity, dismutase activity, alkylation activity, depurination activity, oxidation activity, pyrimidine dimer forming activity, integrase activity, transposase activity, recombinase activity, polymerase activity, ligase activity, helicase activity, photolyase activity or glycosylase activity, acetyltransferase activity, deacetylase activity, kinase activity, phosphatase activity, ubiquitin ligase activity, deubiquitinating activity, adenylation activity, deadenylation activity, SUMOylating activity, deSUMOylating activity, ribosylation activity, deribosylation activity, myristoylation activity, remodeling activity, protease activity, oxidoreductase activity, transferase activity, hydrolase activity, lyase activity, isomerase activity, synthase activity, synthetase activity, and demyristoylation activity, or any combination thereof.

[0676] Non-limiting examples of epitope tags include histidine (His) tags, V5 tags, FLAG tags, influenza hemagglutinin (HA) tags, Myc tags, VSV-G tags, and thioredoxin (Trx) tags. Examples of reporter genes include, but are not limited to, glutathione-5-transferase (GST), horseradish peroxidase (HRP), chloramphenicol acetyltransferase (CAT) beta-galactosidase, beta-glucuronidase, luciferase, green fluorescent protein (GFP), HcRed, DsRed, cyan fluorescent protein (CFP), yellow fluorescent protein (YFP), and autofluorescent proteins including blue fluorescent protein (BFP). Additional protein sequences can include amino acid sequences that bind DNA molecules or bind other cellular molecules, including, but not limited to, maltose binding protein (MBP), S-tag, Lex A DNA binding domain (DBD) fusions, GAL4 DNA binding domain fusions, and herpes simplex virus (HSV) BP16 protein fusions.

[0677] In some embodiments, the adenosine base editor (ABE) can deaminate adenine in DNA. In some embodiments, ABE is generated by replacing APOBEC component of BE3 with natural or engineered E. coli TadA, human ADAR2, mouse ADA, or human ADAT2. In some embodiments, ABE comprises evolved TadA variant. In some embodiments, the ABE is ABE 1.2 (TadA*-XTEN-nCas9-NLS). In some embodiments, TadA* comprises A106V and D108N mutations.

[0678] In some embodiments, the ABE is a second-generation ABE. In some embodiments, the ABE is ABE2.1, which comprises additional mutations D147Y and E155V in TadA* (TadA*2.1). In some embodiments, the ABE is ABE2.2, ABE2.1 fused to catalytically inactivated version of human alkyl adenine DNA glycosylase (AAG with E125Q mutation). In some embodiments, the ABE is ABE2.3, ABE2.1 fused to catalytically inactivated version of E. coli Endo V (inactivated with D35A mutation). In some embodiments, the ABE is ABE2.6 which has a linker twice as long (32 amino acids, (SGGS)₂—XTEN-(SGGS)₂) as the linker in ABE2.1. In some embodiments, the ABE is ABE2.7, which is ABE2.1 tethered with an additional wild-type TadA monomer. In some embodiments, the ABE is ABE2.8, which is ABE2.1 tethered with an additional TadA*2.1 monomer. In some embodiments, the ABE is ABE2.9, which is a direct fusion of evolved TadA (TadA*2.1) to the N-terminus of ABE2.1. In some embodiments, the ABE is ABE2.10, which is a direct fusion of wild-type TadA to the N-terminus of ABE2.1. In some embodiments, the ABE is ABE2.11, which is ABE2.9 with an inactivating E59A mutation at the N-terminus of TadA* monomer. In some embodiments, the ABE is ABE2.12, which is ABE2.9 with an inactivating E59A mutation in the internal TadA* monomer.

[0679] In some embodiments, the ABE is a third generation ABE. In some embodiments, the ABE is ABE3.1, which is ABE2.3 with three additional TadA mutations (L84F, H123Y, and I156F).

[0680] In some embodiments, the ABE is a fourth generation ABE. In some embodiments, the ABE is ABE4.3, which is ABE3.1 with an additional TadA mutation A142N (TadA*4.3).

[0681] In some embodiments, the ABE is a fifth generation ABE. In some embodiments, the ABE is ABE5.1, which is generated by importing a consensus set of mutations from surviving clones (H36L, R51L, S146C, and K157N) into ABE3.1. In some embodiments, the ABE is ABE5.3, which has a heterodimeric construct containing wild-type E. coli TadA fused to an internal evolved TadA*. In some embodiments, the ABE is ABE5.2, ABE5.4, ABE5.5, ABE5.6, ABE5.7, ABE5.8, ABE5.9, ABE5.10, ABE5.11, ABE5.12, ABE5.13, or ABE5.14, as shown in below Table 6. In some embodiments, the ABE is a sixth generation ABE. In some embodiments, the ABE is ABE6.1, ABE6.2, ABE6.3, ABE6.4, ABE6.5, or ABE6.6, as shown in below Table 6. In some embodiments, the ABE is a seventh generation ABE. In some embodiments, the ABE is ABE7.1, ABE7.2, ABE7.3, ABE7.4, ABE7.5, ABE7.6, ABE7.7, ABE7.8, ABE 7.9, or ABE7.10, as shown in Table 6 below.

TABLE 6
Genotypes of ABEs

| | 23 | 26 | 36 | 37 | 48 | 49 | 51 | 72 | 84 | 87 | 105 | 108 | 123 | 125 | 142 | 145 | 147 | 152 | 155 | 156 | 157 | 161 |
|---|---|---|---|---|---|---|---|---|---|---|---|---|---|---|---|---|---|---|---|---|---|---|
| ABE0.1 | W | R | H | N | P | | R | N | L | S | A | D | H | G | A | S | D | R | E | I | K | K |
| ABE0.2 | W | R | H | N | P | | R | N | L | S | A | D | H | G | A | S | D | R | E | I | K | K |
| ABE1.1 | W | R | H | N | P | | R | N | L | S | A | N | H | G | A | S | D | R | E | I | K | K |
| ABE1.2 | W | R | H | N | P | | R | N | L | S | V | N | H | G | A | S | D | R | E | I | K | K |
| ABE2.1 | W | R | H | N | P | | R | N | L | S | V | N | H | G | A | S | Y | R | V | I | K | K |
| ABE2.2 | W | R | H | N | P | | R | N | L | S | V | N | H | G | A | S | Y | R | V | I | K | K |
| ABE2.3 | W | R | H | N | P | | R | N | L | S | V | N | H | G | A | S | Y | R | V | I | K | K |
| ABE2.4 | W | R | H | N | P | | R | N | L | S | V | N | H | G | A | S | Y | R | V | I | K | K |
| ABE2.5 | W | R | H | N | P | | R | N | L | S | V | N | H | G | A | S | Y | R | V | I | K | K |
| ABE2.6 | W | R | H | N | P | | R | N | L | S | V | N | H | G | A | S | Y | R | V | I | K | K |
| ABE2.7 | W | R | H | N | P | | R | N | L | S | V | N | H | G | A | S | Y | R | V | I | K | K |
| ABE2.8 | W | R | H | N | P | | R | N | L | S | V | N | H | G | A | S | Y | R | V | I | K | K |
| ABE2.9 | W | R | H | N | P | | R | N | L | S | V | N | H | G | A | S | Y | R | V | I | K | K |
| ABE2.10 | W | R | H | N | P | | R | N | L | S | V | N | H | G | A | S | Y | R | V | I | K | K |
| ABE2.11 | W | R | H | N | P | | R | N | L | S | V | N | H | G | A | S | Y | R | V | I | K | K |
| ABE2.12 | W | R | H | N | P | | R | N | L | S | V | N | H | G | A | S | Y | R | V | I | K | K |
| ABE3.1 | W | R | H | N | P | | R | N | F | S | V | N | Y | G | A | S | Y | R | V | F | K | K |
| ABE3.2 | W | R | H | N | P | | R | N | F | S | V | N | Y | G | A | S | Y | R | V | F | K | K |
| ABE3.3 | W | R | H | N | P | | R | N | F | S | V | N | Y | G | A | S | Y | R | V | F | K | K |
| ABE3.4 | W | R | H | N | P | | R | N | F | S | V | N | Y | G | A | S | Y | R | V | F | K | K |
| ABE3.5 | W | R | H | N | P | | R | N | F | S | V | N | Y | G | A | S | Y | R | V | F | K | K |
| ABE3.6 | W | R | H | N | P | | R | N | F | S | V | N | Y | G | A | S | Y | R | V | F | K | K |
| ABE3.7 | W | R | H | N | P | | R | N | F | S | V | N | Y | G | A | S | Y | R | V | F | K | K |
| ABE3.8 | W | R | H | N | P | | R | N | F | S | V | N | Y | G | A | S | Y | R | V | F | K | K |
| ABE4.1 | W | R | H | N | P | | R | N | L | S | V | N | H | G | N | S | Y | R | V | I | K | K |
| ABE4.2 | W | G | H | N | P | | R | N | L | S | V | N | H | G | N | S | Y | R | V | I | K | K |
| ABE4.3 | W | R | H | N | P | | R | N | F | S | V | N | Y | G | N | S | Y | R | V | F | K | K |
| ABE5.1 | W | R | L | N | P | | L | N | F | S | V | N | Y | G | A | C | Y | R | V | F | N | K |
| ABE5.2 | W | R | H | S | P | | R | N | F | S | V | N | Y | G | A | S | Y | R | V | F | K | T |
| ABE5.3 | W | R | L | N | P | | L | N | I | S | V | N | Y | G | A | C | Y | R | V | I | N | K |
| ABE5.4 | W | R | H | S | P | | R | N | F | S | V | N | Y | G | A | S | Y | R | V | F | K | T |
| ABE5.5 | W | R | L | N | P | | L | N | F | S | V | N | Y | G | A | C | Y | R | V | F | N | K |
| ABE5.6 | W | R | L | N | P | | L | N | F | S | V | N | Y | G | A | C | Y | R | V | F | N | K |
| ABE5.7 | W | R | L | N | P | | L | N | F | S | V | N | Y | G | A | C | Y | R | V | F | N | K |
| ABE5.8 | W | R | L | N | P | | L | N | F | S | V | N | Y | G | A | C | Y | R | V | F | N | K |
| ABE5.9 | W | R | L | N | P | | L | N | F | S | V | N | Y | G | A | C | Y | R | V | F | N | K |
| ABE5.10 | W | R | L | N | P | | L | N | F | S | V | N | Y | G | A | C | Y | R | V | F | N | K |
| ABE5.11 | W | R | L | N | P | | L | N | F | S | V | N | Y | G | A | C | Y | R | V | F | N | K |
| ABE5.12 | W | R | L | N | P | | L | N | F | S | V | N | Y | G | A | C | Y | R | V | F | N | K |
| ABE5.13 | W | R | H | N | P | | L | D | F | S | V | N | Y | A | A | S | Y | R | V | F | K | K |
| ABE5.14 | W | R | H | N | S | | L | N | F | C | V | N | Y | G | A | S | Y | R | V | F | K | K |
| ABE6.1 | W | R | H | N | S | | L | N | F | S | V | N | Y | G | N | S | Y | R | V | F | K | K |
| ABE6.2 | W | R | H | N | T | V | L | N | F | S | V | N | Y | G | N | S | Y | R | V | F | N | K |
| ABE6.3 | W | R | L | N | S | | L | N | F | S | V | N | Y | G | A | C | Y | R | V | F | N | K |
| ABE6.4 | W | R | L | N | S | | L | N | F | S | V | N | Y | G | N | C | Y | R | V | F | N | K |
| ABE6.5 | W | R | L | N | I | V | L | N | F | S | V | N | Y | G | A | C | Y | R | V | F | N | K |
| ABE6.6 | W | R | L | N | T | V | L | N | F | S | V | N | Y | G | N | C | Y | R | V | F | N | K |
| ABE7.1 | W | R | L | N | A | | L | N | F | S | V | N | Y | G | A | C | Y | R | V | F | N | K |
| ABE7.2 | W | R | L | N | A | | L | N | F | S | V | N | Y | G | N | C | Y | R | V | F | N | K |
| ABE7.3 | I | R | L | N | A | | L | N | F | S | V | N | Y | G | A | C | Y | R | V | F | N | K |
| ABE7.4 | R | R | L | N | A | | L | N | F | S | V | N | Y | G | A | C | Y | R | V | F | N | K |
| ABE7.5 | W | R | L | N | A | | L | N | F | S | V | N | Y | G | A | C | Y | H | V | F | N | K |
| ABE7.6 | W | R | L | N | A | | L | N | I | S | V | N | Y | G | A | C | Y | P | V | I | N | K |
| ABE7.7 | L | R | L | N | A | | L | N | F | S | V | N | Y | G | A | C | Y | P | V | F | N | K |
| ABE7.8 | I | R | L | N | A | | L | N | F | S | V | N | Y | G | N | C | Y | R | V | F | N | K |
| ABE7.9 | L | R | L | N | A | | L | N | F | S | V | N | Y | G | N | C | Y | P | V | F | N | K |
| ABE7.10 | R | R | L | N | A | | L | N | F | S | V | N | Y | G | A | C | Y | P | V | F | N | K |

[0682] In some embodiments, the base editor is an adenosine base editor. In some embodiments, the adenosine base editor is an eighth generation ABE (ABE8). In some embodiments, the ABE8 contains a TadA*8 variant. In some embodiments, the ABE8 has a monomeric construct containing a TadA*8 variant (“ABE8.x-m”). In some embodiments, the ABE8 is ABE8.1-m, which has a monomeric construct containing TadA*7.10 with a Y147T mutation (TadA*8.1). In some embodiments, the ABE8 is ABE8.2-m, which has a monomeric construct containing TadA*7.10 with a Y147R mutation (TadA*8.2). In some embodiments, the ABE8 is ABE8.3-m, which has a monomeric construct containing TadA*7.10 with a Q154S mutation (TadA*8.3). In some embodiments, the ABE8 is ABE8.4-m, which has a monomeric construct containing TadA*7.10 with a Y123H mutation (TadA*8.4). In some embodiments, the ABE8 is ABE8.5-m, which has a monomeric construct containing TadA*7.10 with a V82S mutation (TadA*8.5). In some embodiments, the ABE8 is ABE8.6-m, which has a monomeric construct containing TadA*7.10 with a T166R mutation (TadA*8.6). In some embodiments, the ABE8 is ABE8.7-m, which has a monomeric construct containing TadA*7.10 with a Q154R mutation (TadA*8.7). In some embodiments, the ABE8 is ABE8.8-m, which has a monomeric construct containing TadA*7.10 with Y147R, Q154R, and Y123H mutations (TadA*8.8). In some embodiments, the ABE8 is ABE8.9-m, which has a monomeric construct containing TadA*7.10 with Y147R, Q154R and I76Y mutations (TadA*8.9). In some embodiments, the ABE8 is ABE8.10-m, which has a monomeric construct containing TadA*7.10 with Y147R, Q154R, and T166R mutations (TadA*8.10). In some embodiments, the ABE8 is ABE8.11-m, which has a monomeric construct containing TadA*7.10 with Y147T and Q154R mutations (TadA*8.11). In some embodiments, the ABE8 is ABE8.12-m, which has a monomeric construct containing TadA*7.10 with Y147T and Q154S mutations (TadA*8.12). In some embodiments, the ABE8 is ABE8.13-m, which has a monomeric construct containing TadA*7.10 with Y123H (Y123H reverted from H123Y), Y147R, Q154R and I76Y mutations (TadA*8.13). In some embodiments, the ABE8 is ABE8.14-m, which has a monomeric construct containing TadA*7.10 with 176Y and V82S mutations (TadA*8.14). In some embodiments, the ABE8 is ABE8.15-m, which has a monomeric construct containing TadA*7.10 with V82S and Y147R mutations (TadA*8.15). In some embodiments, the ABE8 is ABE8.16-m, which has a monomeric construct containing TadA*7.10 with V82S, Y123H (Y123H reverted from H123Y) and Y147R mutations (TadA*8.16). In some embodiments, the ABE8 is ABE8.17-m, which has a monomeric construct containing TadA*7.10 with V82S and Q154R mutations (TadA*8.17). In some embodiments, the ABE8 is ABE8.18-m, which has a monomeric construct containing TadA*7.10 with V82S, Y123H (Y123H reverted from H123Y) and Q154R mutations (TadA*8.18). In some embodiments, the ABE8 is ABE8.19-m, which has a monomeric construct containing TadA*7.10 with V82S, Y123H (Y123H reverted from H123Y), Y147R and Q154R mutations (TadA*8.19). In some embodiments, the ABE8 is ABE8.20-m, which has a monomeric construct containing TadA*7.10 with I76Y, V82S, Y123H (Y123H reverted from H123Y), Y147R and Q154R mutations (TadA*8.20). In some embodiments, the ABE8 is ABE8.21-m, which has a monomeric construct containing TadA*7.10 with Y147R and Q154S mutations (TadA*8.21). In some embodiments, the ABE8 is ABE8.22-m, which has a monomeric construct containing TadA*7.10 with V82S and Q154S mutations (TadA*8.22). In some embodiments, the ABE8 is ABE8.23-m, which has a monomeric construct containing TadA*7.10 with V82S and Y123H (Y123H reverted from H123Y) mutations (TadA*8.23). In some embodiments, the ABE8 is ABE8.24-m, which has a monomeric construct containing TadA*7.10 with V82S, Y123H (Y123H reverted from H123Y), and Y147T mutations (TadA*8.24).

[0683] In some embodiments, the ABE8 has a heterodimeric construct containing wild-type E. coli TadA fused to a TadA*8 variant (“ABE8.x-d”). In some embodiments, the ABE8 is ABE8.1-d, which has a heterodimeric construct containing wild-type E. coli TadA fused to TadA*7.10 with a Y147T mutation (TadA*8.1). In some embodiments, the ABE8 is ABE8.2-d, which has a heterodimeric construct containing wild-type E. coli TadA fused to TadA*7.10 with a Y147R mutation (TadA*8.2). In some embodiments, the ABE8 is ABE8.3-d, which has a heterodimeric construct containing wild-type E. coli TadA fused to TadA*7.10 with a Q154S mutation (TadA*8.3). In some embodiments, the ABE8 is ABE8.4-d, which has a heterodimeric construct containing wild-type E. coli TadA fused to TadA*7.10 with a Y123H mutation (TadA*8.4). In some embodiments, the ABE8 is ABE8.5-d, which has a heterodimeric construct containing wild-type E. coli TadA fused to TadA*7.10 with a V82S mutation (TadA*8.5). In some embodiments, the ABE8 is ABE8.6-d, which has a heterodimeric construct containing wild-type E. coli TadA fused to TadA*7.10 with a T166R mutation (TadA*8.6). In some embodiments, the ABE8 is ABE8.7-d, which has a heterodimeric construct containing wild-type E. coli TadA fused to TadA*7.10 with a Q154R mutation (TadA*8.7). In some embodiments, the ABE8 is ABE8.8-d, which has a heterodimeric construct containing wild-type E. coli TadA fused to TadA*7.10 with Y147R, Q154R, and Y123H mutations (TadA*8.8). In some embodiments, the ABE8 is ABE8.9-d, which has a heterodimeric construct containing wild-type E. coli TadA fused to TadA*7.10 with Y147R, Q154R and I76Y mutations (TadA*8.9). In some embodiments, the ABE8 is ABE8.10-d, which has a heterodimeric construct containing wild-type E. coli TadA fused to TadA*7.10 with Y147R, Q154R, and T166R mutations (TadA*8.10). In some embodiments, the ABE8 is ABE8.11-d, which has a heterodimeric construct containing wild-type E. coli TadA fused to TadA*7.10 with Y147T and Q154R mutations (TadA*8.11). In some embodiments, the ABE8 is ABE8.12-d, which has heterodimeric construct containing wild-type E. coli TadA fused to TadA*7.10 with Y147T and Q154S mutations (TadA*8.12). In some embodiments, the ABE8 is ABE8.13-d, which has a heterodimeric construct containing wild-type E. coli TadA fused to TadA*7.10 with Y123H (Y123H reverted from H123Y), Y147R, Q154R and I76Y mutations (TadA*8.13). In some embodiments, the ABE8 is ABE8.14-d, which has a heterodimeric construct containing wild-type E. coli TadA fused to TadA*7.10 with I76Y and V82S mutations (TadA*8.14). In some embodiments, the ABE8 is ABE8.15-d, which has a heterodimeric construct containing wild-type E. coli TadA fused to TadA*7.10 with V82S and Y147R mutations (TadA*8.15). In some embodiments, the ABE8 is ABE8.16-d, which has a heterodimeric construct containing wild-type E. coli TadA fused to TadA*7.10 with V82S, Y123H (Y123H reverted from H123Y) and Y147R mutations (TadA*8.16). In some embodiments, the ABE8 is ABE8.17-d, which has a heterodimeric construct containing wild-type E. coli TadA fused to TadA*7.10 with V82S and Q154R mutations (TadA*8.17). In some embodiments, the ABE8 is ABE8.18-d, which has a heterodimeric construct containing wild-type E. coli TadA fused to TadA*7.10 with V82S, Y123H (Y123H reverted from H123Y) and Q154R mutations (TadA*8.18). In some embodiments, the ABE8 is ABE8.19-d, which has a heterodimeric construct containing wild-type E. coli TadA fused to TadA*7.10 with V82S, Y123H (Y123H reverted from H123Y), Y147R and Q154R mutations (TadA*8.19). In some embodiments, the ABE8 is ABE8.20-d, which has a heterodimeric construct containing wild-type E. coli TadA fused to TadA*7.10 with I76Y, V82S, Y123H (Y123H reverted from H123Y), Y147R and Q154R mutations (TadA*8.20). In some embodiments, the ABE8 is ABE8.21-d, which has a heterodimeric construct containing wild-type E. coli TadA fused to TadA*7.10 with Y147R and Q154S mutations (TadA*8.21). In some embodiments, the ABE8 is ABE8.22-d, which has a heterodimeric construct containing wild-type E. coli TadA fused to TadA*7.10 with V82S and Q154S mutations (TadA*8.22). In some embodiments, the ABE8 is ABE8.23-d, which has a heterodimeric construct containing wild-type E. coli TadA fused to TadA*7.10 with V82S and Y123H (Y123H reverted from H123Y) mutations (TadA*8.23). In some embodiments, the ABE8 is ABE8.24-d, which has a heterodimeric construct containing wild-type E. coli TadA fused to TadA*7.10 with V82S, Y123H (Y123H reverted from H123Y), and Y147T mutations (TadA*8.24).

[0684] In some embodiments, the ABE8 has a heterodimeric construct containing TadA*7.10 fused to a TadA*8 variant (“ABE8.x-7”). In some embodiments, the ABE8 is ABE8.1-7, which has a heterodimeric construct containing TadA*7.10 fused to TadA*7.10 with a Y147T mutation (TadA*8.1). In some embodiments, the ABE8 is ABE8.2-7, which has a heterodimeric construct containing TadA*7.10 fused to TadA*7.10 with a Y147R mutation (TadA*8.2). In some embodiments, the ABE8 is ABE8.3-7, which has a heterodimeric construct containing TadA*7.10 fused to TadA*7.10 with a Q154S mutation (TadA*8.3). In some embodiments, the ABE8 is ABE8.4-7, which has a heterodimeric construct containing TadA*7.10 fused to TadA*7.10 with a Y123H mutation (TadA*8.4). In some embodiments, the ABE8 is ABE8.5-7, which has a heterodimeric construct containing TadA*7.10 fused to TadA*7.10 with a V82S mutation (TadA*8.5). In some embodiments, the ABE8 is ABE8.6-7, which has a heterodimeric construct containing TadA*7.10 fused to TadA*7.10 with a T166R mutation (TadA*8.6). In some embodiments, the ABE8 is ABE8.7-7, which has a heterodimeric construct containing TadA*7.10 fused to TadA*7.10 with a Q154R mutation (TadA*8.7). In some embodiments, the ABE8 is ABE8.8-7, which has a heterodimeric construct containing TadA*7.10 fused to TadA*7.10 with Y147R, Q154R, and Y123H mutations (TadA*8.8). In some embodiments, the ABE8 is ABE8.9-7, which has a heterodimeric construct containing TadA*7.10 fused to TadA*7.10 with Y147R, Q154R and I76Y mutations (TadA*8.9). In some embodiments, the ABE8 is ABE8.10-7, which has a heterodimeric construct containing TadA*7.10 fused to TadA*7.10 with Y147R, Q154R, and T166R mutations (TadA*8.10). In some embodiments, the ABE8 is ABE8.11-7, which has a heterodimeric construct containing TadA*7.10 fused to TadA*7.10 with Y147T and Q154R mutations (TadA*8.11). In some embodiments, the ABE8 is ABE8.12-7, which has a heterodimeric construct containing TadA*7.10 fused to TadA*7.10 with Y147T and Q154S mutations (TadA*8.12). In some embodiments, the ABE8 is ABE8.13-7, which has a heterodimeric construct containing TadA*7.10 fused to TadA*7.10 with Y123H (Y123H reverted from H123Y), Y147R, Q154R and I76Y mutations (TadA*8.13). In some embodiments, the ABE8 is ABE8.14-7, which has a heterodimeric construct containing TadA*7.10 fused to TadA*7.10 with I76Y and V82S mutations (TadA*8.14). In some embodiments, the ABE8 is ABE8.15-7, which has a heterodimeric construct containing TadA*7.10 fused to TadA*7.10 with V82S and Y147R mutations (TadA*8.15). In some embodiments, the ABE8 is ABE8.16-7, which has a heterodimeric construct containing TadA*7.10 fused to TadA*7.10 with V82S, Y123H (Y123H reverted from H123Y) and Y147R mutations (TadA*8.16). In some embodiments, the ABE8 is ABE8.17-7, which has a heterodimeric construct containing TadA*7.10 fused to TadA*7.10 with V82S and Q154R mutations (TadA*8.17). In some embodiments, the ABE8 is ABE8.18-7, which has a heterodimeric construct containing TadA*7.10 fused to TadA*7.10 with V82S, Y123H (Y123H reverted from H123Y) and Q154R mutations (TadA*8.18). In some embodiments, the ABE8 is ABE8.19-7, which has a heterodimeric construct containing TadA*7.10 fused to TadA*7.10 with V82S, Y123H (Y123H reverted from H123Y), Y147R and Q154R mutations (TadA*8.19). In some embodiments, the ABE8 is ABE8.20-7, which has a heterodimeric construct containing TadA*7.10 fused to TadA*7.10 with I76Y, V82S, Y123H (Y123H reverted from H123Y), Y147R and Q154R mutations (TadA*8.20). In some embodiments, the ABE8 is ABE8.21-7, which has a heterodimeric construct containing TadA*7.10 fused to TadA*7.10 with Y147R and Q154S mutations (TadA*8.21). In some embodiments, the ABE8 is ABE8.22-7, which has a heterodimeric construct containing TadA*7.10 fused to TadA*7.10 with V82S and Q154S mutations (TadA*8.22). In some embodiments, the ABE8 is ABE8.23-7, which has a heterodimeric construct containing TadA*7.10 fused to TadA*7.10 with V82S and Y123H (Y123H reverted from H123Y) mutations (TadA*8.23). In some embodiments, the ABE8 is ABE8.24-7, which has a heterodimeric construct containing TadA*7.10 fused to TadA*7.10 with V82S, Y123H (Y123H reverted from H123Y), and Y147T mutations (TadA*8.24

[0685] In some embodiments, the ABE is ABE8.1-m, ABE8.2-m, ABE8.3-m, ABE8.4-m, ABE8.5-m, ABE8.6-m, ABE8.7-m, ABE8.8-m, ABE8.9-m, ABE8.10-m, ABE8.11-m, ABE8.12-m, ABE8.13-m, ABE8.14-m, ABE8.15-m, ABE8.16-m, ABE8.17-m, ABE8.18-m, ABE8.19-m, ABE8.20-m, ABE8.21-m, ABE8.22-m, ABE8.23-m, ABE8.24-m, ABE8.1-d, ABE8.2-d, ABE8.3-d, ABE8.4-d, ABE8.5-d, ABE8.6-d, ABE8.7-d, ABE8.8-d, ABE8.9-d, ABE8.10-d, ABE8.11-d, ABE8.12-d, ABE8.13-d, ABE8.14-d, ABE8.15-d, ABE8.16-d, ABE8.17-d, ABE8.18-d, ABE8.19-d, ABE8.20-d, ABE8.21-d, ABE8.22-d, ABE8.23-d, or ABE8.24-d as shown in Table 7 below.

TABLE 7
ABE8 Base Editors

| ABE8 Base | Adenosine | |
|---|---|---|
| Editor | Deaminase | Adenosine Deaminase Description |
| ABE8.1-m | TadA*8.1 | Monomer_TadA*7.10 + Y147T |
| ABE8.2-m | TadA*8.2 | Monomer_TadA*7.10 + Y147R |
| ABE8.3-m | TadA*8.3 | Monomer_TadA*7.10 + Q1545 |
| ABE8.4-m | TadA*8.4 | Monomer_TadA*7.10 + Y123H |
| ABE8.5-m | TadA*8.5 | Monomer_TadA*7.10 + V82S |
| ABE8.6-m | TadA*8.6 | Monomer_TadA*7.10 + T166R |
| ABE8.7-m | TadA*8.7 | Monomer_TadA*7.10 + Q154R |
| ABE8.8-m | TadA*8.8 | Monomer_TadA*7.10 + Y147R_Q154R_Y123H |
| ABE8.9-m | TadA*8.9 | Monomer_TadA*7.10 + Y147R_Q154R_I76Y |
| ABE8.10-m | TadA*8.10 | Monomer_TadA*7.10 + Y147R_Q154R_T166R |
| ABE8.11-m | TadA*8.11 | Monomer_TadA*7.10 + Y147T_Q154R |
| ABE8.12-m | TadA*8.12 | Monomer_TadA*7.10 + Y147T_Q154S |
| ABE8.13-m | TadA*8.13 | Monomer_TadA*7.10 + Y123H_Y147R_Q154R_I76Y |
| ABE8.14-m | TadA*8.14 | Monomer_TadA*7.10 + I76Y_V82S |
| ABE8.15-m | TadA*8.15 | Monomer_TadA*7.10 + V82S_Y147R |
| ABE8.16-m | TadA*8.16 | Monomer_TadA*7.10 + V82S_Y123H_Y147R |
| ABE8.17-m | TadA*8.17 | Monomer_TadA*7.10 + V82S_Q154R |
| ABE8.18-m | TadA*8.18 | Monomer_TadA*7.10 + V82S_Y123H_Q154R |
| ABE8.19-m | TadA*8.19 | Monomer_TadA*7.10 + V82S_Y123H_Y147R_Q154R |
| ABE8.20-m | TadA*8.20 | Monomer_TadA*7.10 + I76Y_V82S_Y123H_Y147R_Q154R |
| ABE8.21-m | TadA*8.21 | Monomer_TadA*7.10 + Y147R_Q154S |
| ABE8.22-m | TadA*8.22 | Monomer_TadA*7.10 + V82S_Q154S |
| ABE8.23-m | TadA*8.23 | Monomer_TadA*7.10 + V82S_Y123H |
| ABE8.24-m | TadA*8.24 | Monomer_TadA*7.10 + V82S_Y123H_Y147T |
| ABE8.1-d | TadA*8.1 | Heterodimer_(WT) + (TadA*7.10 + Y147T) |
| ABE8.2-d | TadA*8.2 | Heterodimer_(WT) + (TadA*7.10 + Y147R) |
| ABE8.3-d | TadA*8.3 | Heterodimer_(WT) + (TadA*7.10 + Q154S) |
| ABE8.4-d | TadA*8.4 | Heterodimer_(WT) + (TadA*7.10 + Y123H) |
| ABE8.5-d | TadA*8.5 | Heterodimer_(WT) + (TadA*7.10 + V82S) |
| ABE8.6-d | TadA*8.6 | Heterodimer_(WT) + (TadA*7.10 + T166R) |
| ABE8.7-d | TadA*8.7 | Heterodimer_(WT) + (TadA*7.10 + Q154R) |
| ABE8.8-d | TadA*8.8 | Heterodimer_(WT) + (TadA*7.10 + Y147R_Q154R_Y123H) |
| ABE8.9-d | TadA*8.9 | Heterodimer_(WT) + (TadA*7.10 + Y147R_Q154R_I76Y) |
| ABE8.10-d | TadA*8.10 | Heterodimer_(WT) + (TadA*7.10 + Y147R_Q154R_T166R) |
| ABE8.11-d | TadA*8.11 | Heterodimer_(WT) + (TadA*7.10 + Y147T_Q154R) |
| ABE8.12-d | TadA*8.12 | Heterodimer_(WT) + (TadA*7.10 + Y147T_Q154S) |
| ABE8.13-d | TadA*8.13 | Heterodimer_(WT) + (TadA*7.10 + Y123H_Y147T_Q154R_I76Y) |
| ABE8.14-d | TadA*8.14 | Heterodimer_(WT) + (TadA*7.10 + I76Y_V82S) |
| ABE8.15-d | TadA*8.15 | Heterodimer_(WT) + (TadA*7.10 + V82S_ Y147R) |
| ABE8.16-d | TadA*8.16 | Heterodimer_(WT) + (TadA*7.10 + V82S_Y123H_Y147R) |
| ABE8.17-d | TadA*8.17 | Heterodimer_(WT) + (TadA*7.10 + V82S_Q154R) |
| ABE8.18-d | TadA*8.18 | Heterodimer_(WT) + (TadA*7.10 + V82S_Y123H_Q154R) |
| ABE8.19-d | TadA*8.19 | Heterodimer_(WT) + (TadA*7.10 + V82S_Y123H_Y147R_Q154R) |
| ABE8.20-d | TadA*8.20 | Heterodimer_(WT) + (TadA*7.10 + I76Y_V82S_Y123H_Y147R_ |
| | | Q154R) |
| ABE8.21-d | TadA*8.21 | Heterodimer_(WT) + (TadA*7.10 + Y147R_Q154S) |
| ABE8.22-d | TadA*8.22 | Heterodimer_(WT) + (TadA*7.10 + V82S_Q154S) |
| ABE8.23-d | TadA*8.23 | Heterodimer_(WT) + (TadA*7.10 + V82S_Y123H) |
| ABE8.24-d | TadA*8.24 | Heterodimer_(WT) + (TadA*7.10 + V82S_Y123H_Y147T) |

[0686] In some embodiments, base editors (e.g., ABE8) are generated by cloning an adenosine deaminase variant (e.g., TadA*8) into a scaffold that includes a circular permutant Cas9 (e.g., CP5 or CP6) and a bipartite nuclear localization sequence. In some embodiments, the base editor (e.g., ABE7.9, ABET10, or ARE8) is an NGC PAM CP5 variant (S. pyrogenes Cas9 or spVRQR Cas9). In some embodiments, the base editor (e.g., ABE7.9, ABE7.10, or ABE8) is an AGA PAM CP5 variant (S. pyrogenes Cas9 or spVRQR Cas9). In some embodiments, the base editor (e.g., ABE7.9, ABE7.10, or ABE8) is an NGC PAM CP6 variant (S. pyrogenes Cas9 or spVRQR Cas9). In some embodiments, the base editor (e.g. ABE7.9, ABE7.10, or ARE8) is an AGA PAM CP6 variant (S. pyrogenes Cas9 or spVRQR Cas9).

[0687] In some embodiments, the ABE has a genotype as shown in Table 8 below.

TABLE 8
Genotypes of ABEs

| | 23 | 26 | 36 | 37 | 48 | 49 | 51 | 72 | 84 | 87 | 105 | 108 | 123 | 125 | 142 | 145 | 147 | 152 | 155 | 156 | 157 | 161 |
|---|---|---|---|---|---|---|---|---|---|---|---|---|---|---|---|---|---|---|---|---|---|---|
| ABE7.9 | L | R | L | N | A | | L | N | F | S | V | N | Y | G | N | C | Y | P | V | F | N | K |
| ABE7.10 | R | R | L | N | A | | L | N | F | S | V | N | Y | G | A | C | Y | P | V | F | N | K |

[0688] As shown in Table 9 below, genotypes of 40 ARE8s are described. Residue positions in the evolved E. coli TadA portion of ABE are indicated. Mutational changes in ABE8 are shown when distinct from ARE7.10 mutations. In some embodiments, the ABE has a genotype of one of the ABEs as shown in Table 9 below.

TABLE 9
Residue Identity in Evolved TadA

| | 23 | 36 | 48 | 51 | 76 | 82 | 84 | 106 | 108 | 123 | 146 | 147 | 152 | 154 | 155 | 156 | 157 | 166 |
|---|---|---|---|---|---|---|---|---|---|---|---|---|---|---|---|---|---|---|
| ABE7.10 | R | L | A | L | I | V | F | V | N | Y | C | Y | P | Q | V | F | N | T |
| ABE8.1-m | | | | | | | | | | | | T | | | | | | |
| ABE8.2-m | | | | | | | | | | | | R | | | | | | |
| ABE8.3-m | | | | | | | | | | | | | | S | | | | |
| ABE8.4-m | | | | | | | | | | H | | | | | | | | |
| ABE8.5-m | | | | | | S | | | | | | | | | | | | |
| ABE8.6-m | | | | | | | | | | | | | | | | | | R |
| ABE8.7-m | | | | | | | | | | | | | | R | | | | |
| ABE8.8-m | | | | | | | | | | H | | R | | R | | | | |
| ABE8.9-m | | | | | Y | | | | | | | R | | R | | | | |
| ABE8.10-m | | | | | | | | | | | | R | | R | | | | R |
| ABE8.11-m | | | | | | | | | | | | T | | R | | | | |
| ABE8.12-m | | | | | | | | | | | | T | | S | | | | |
| ABE8.13-m | | | | | Y | | | | | H | | R | | R | | | | |
| ABE8.14-m | | | | | Y | S | | | | | | | | | | | | |
| ABE8.15-m | | | | | | S | | | | | | R | | | | | | |
| ABE8.16-m | | | | | | S | | | | H | | R | | | | | | |
| ABE8.17-m | | | | | | S | | | | | | | | R | | | | |
| ABE8.18-m | | | | | | S | | | | H | | | | R | | | | |
| ABE8.19-m | | | | | | S | | | | H | | R | | R | | | | |
| ABE8.20-m | | | | | Y | S | | | | H | | R | | R | | | | |
| ABE8.21-m | | | | | | | | | | | | R | | S | | | | |
| ABE8.22-m | | | | | | S | | | | | | | | S | | | | |
| ABE8.23-m | | | | | | S | | | | H | | | | | | | | |
| ABE8.24-m | | | | | | S | | | | H | | T | | | | | | |
| ABE8.1-d | | | | | | | | | | | | T | | | | | | |
| ABE8.2-d | | | | | | | | | | | | R | | | | | | |
| ABE8.3-d | | | | | | | | | | | | | | S | | | | |
| ABE8.4-d | | | | | | | | | | H | | | | | | | | |
| ABE8.5-d | | | | | | S | | | | | | | | | | | | |
| ABE8.6-d | | | | | | | | | | | | | | | | | | R |
| ABE8.7-d | | | | | | | | | | | | | | R | | | | |
| ABE8.8-d | | | | | | | | | | H | | R | | R | | | | |
| ABE8.9-d | | | | | Y | | | | | | | R | | R | | | | |
| ABE8.10-d | | | | | | | | | | | | R | | R | | | | R |
| ABE8.11-d | | | | | | | | | | | | T | | R | | | | |
| ABE8.12-d | | | | | | | | | | | | T | | S | | | | |
| ABE8.13-d | | | | | Y | | | | | H | | R | | R | | | | |
| ABE8.14-d | | | | | Y | S | | | | | | | | | | | | |
| ABE8.15-d | | | | | | S | | | | | | R | | | | | | |
| ABE8.16-d | | | | | | S | | | | H | | R | | | | | | |
| ABE8.17-d | | | | | | S | | | | | | | | R | | | | |
| ABE8.18-d | | | | | | S | | | | H | | | | R | | | | |
| ABE8.19-d | | | | | | S | | | | H | | R | | R | | | | |
| ABE8.20-d | | | | | Y | S | | | | H | | R | | R | | | | |
| ABE8.21-d | | | | | | | | | | | | R | | S | | | | |
| ABE8.22-d | | | | | | S | | | | | | | | S | | | | |
| ABE8.23-d | | | | | | S | | | | H | | | | | | | | |
| ABE8.24-d | | | | | | S | | | | H | | T | | | | | | |

[0689] In some embodiments, the base editor is ABE8.1, which comprises or consists essentially of the following sequence or a fragment thereof having adenosine deaminase activity:

ABE8.1_Y147T_CP5_NGC PAM_monomer
MSEVEFSHEYWMRHALTLAKRARDEREVPVGAVLVLNNRVIGEGWNRAIGLHDPTAHAEIMA
LRQGGLVMQNYRLIDATLYVTFEPCVMCAGAMIHSRIGRVVFGVRNAKTGAAGSLMDVLHYP
GMNHRVEITEGILADECAALLCTFFRMPRQVFNAQKKAQSSTD [symbol] [symbol]
EIGKATAKYFFYSNIMNFFKTEITLANGEIRKRPLIETNGETGEIVWDK
GRDFATVRKVLSMPQVNIVKKTEVQTGGFSKESILPKRNSDKLIARKKDWDPKKYGGFMQPT
VAYSVLVVAKVEKGKSKKLKSVKELLGITIMERSSFEKNPIDFLEAKGYKEVKKDLIIKLPK
YSLFELENGRKRMLASAKFLQKGNELALPSKYVNFLYLASHYEKLKGSPEDNEQKQLFVEQH
KHYLDEIIEQISEFSKRVILADANLDKVLSAYNKHRDKPIREQAENIIHLFTLTNLGAPRAF
KYFDTTIARKEYRSTKEVLDATLIHQSITGLYETRIDLSQLGGD [symbol] [symbol]
MDKKYSIGLAIGTNSVGWAVITDEYKVPSKKFKVLGNTDRHSIKKNLIGALLFDSGETAE
ATRLKRTARRRYTRRKNRICYLQEIFSNEMAKVDDSFFHRLEESFLVEEDKKHERHPIFGNI
VDEVAYHEKYPTIYHLRKKLVDSTDKADLRLIYLALAHMIKFRGHFLIEGDLNPDNSDVDKL
FIQLVQTYNQLFEENPINASGVDAKAILSARLSKSRRLENLIAQLPGEKKNGLFGNLIALSL
GLTPNFKSNFDLAEDAKLQLSKDTYDDDLDNLLAQIGDQYADLFLAAKNLSDAILLSDILRV
NTEITKAPLSASMIKRYDEHHQDLTLLKALVRQQLPEKYKEIFFDQSKNGYAGYIDGGASQE
EFYKFIKPILEKMDGTEELLVKLNREDLLRKQRTFDNGSIPHQIHLGELHAILRRQEDFYPF
LKDNREKIEKILTFRIPYYVGPLARGNSRFAWMTRKSEETITPWNFEEVVDKGASAQSFIER
MTNFDKNLPNEKVLPKHSLLYEYFTVYNELTKVKYVTEGMRKPAFLSGEQKKAIVDLLFKTN
RKVTVKQLKEDYFKKIECFDSVEISGVEDRFNASLGTYHDLLKIIKDKDFLDNEENEDILED
IVLTLTLFEDREMIEERLKTYAHLFDDKVMKQLKRRRYTGWGRLSRKLINGIRDKQSGKTIL
DFLKSDGFANRNFMQLIHDDSLTFKEDIQKAQVSGQGDSLHEHIANLAGSPAIKKGILQTVK
VVDELVKVMGRHKPENIVIEMARENQTTQKGQKNSRERMKRIEEGIKELGSQILKEHPVENT
QLQNEKLYLYYLQNGRDMYVDQELDINRLSDYDVDHIVPQSFLKDDSIDNKVLTRSDKNRGK
SDNVPSEEVVKKMKNYWRQLLNAKLITQRKFDNLTKAERGGLSELDKAGFIKRQLVETRQIT
KHVAQILDSRMNTKYDENDKLIREVKVITLKSKLVSDFRKDFQFYKVREINNYHHAHDAYLN
AVVGTALIKKYPKLESEFVYGDYKVYDVRKMIAKSEQEGADKRTADGSEFESPKKKRKV*

[0690] In the above sequence, the plain text denotes an adenosine deaminase sequence, bold sequence indicates sequence derived from Cas9, the italics sequence denotes a linker sequence, and the underlined sequence denotes a bipartite nuclear localization sequence.

[0691] In some embodiments, the base editor is ABE8.1, which comprises or consists essentially of the following sequence or a fragment thereof having adenosine deaminase activity:

pNMG-B335 ABE8.1_Y147T_CP5_NGC PAM_monomer
MSEVEFSHEYWMRHALTLAKRARDEREVPVGAVLVLNNRVIGEGWNRAIGLHDPTAHAEIMA
LRQGGLVMQNYRLIDATLYVTFEPCVMCAGAMIHSRIGRVVFGVRNAKTGAAGSLMDVLHYP
GMNHRVEITEGILADECAALLCTFFRMPRQVFNAQKKAQSSTDSGGSSGGSSGSETPGTSES
ATPESSGGSSGGSEIGKATAKYFFYSNIMNFFKTEITLANGEIRKRPLIETNGETGEIVWDK
GRDFATVRKVLSMPQVNIVKKTEVQTGGFSKESILPKRNSDKLIARKKDWDPKKYGGFMQPT
VAYSVLVVAKVEKGKSKKLKSVKELLGITIMERSSFEKNPIDFLEAKGYKEVKKDLIIKLPK
YSLFELENGRKRMLASAKFLQKGNELALPSKYVNFLYLASHYEKLKGSPEDNEQKQLFVEQH
KHYLDEIIEQISEFSKRVILADANLDKVLSAYNKHRDKPIREQAENIIHLFTLTNLGAPRAF
KYFDTTIARKEYRSTKEVLDATLIHQSITGLYETRIDLSQLGGDGGSGGSGGSGGSGGSGGS
GGMDKKYSIGLAIGTNSVGWAVITDEYKVPSKKFKVLGNTDRHSIKKNLIGALLFDSGETAE
ATRLKRTARRRYTRRKNRICYLQEIFSNEMAKVDDSFFHRLEESFLVEEDKKHERHPIFGNI
VDEVAYHEKYPTIYHLRKKLVDSTDKADLRLIYLALAHMIKFRGHFLIEGDLNPDNSDVDKL
FIQLVQTYNQLFEENPINASGVDAKAILSARLSKSRRLENLIAQLPGEKKNGLFGNLIALSL
GLTPNFKSNFDLAEDAKLQLSKDTYDDDLDNLLAQIGDQYADLFLAAKNLSDAILLSDILRV
NTEITKAPLSASMIKRYDEHHQDLTLLKALVRQQLPEKYKEIFFDQSKNGYAGYIDGGASQE
EFYKFIKPILEKMDGTEELLVKLNREDLLRKQRTFDNGSIPHQIHLGELHAILRRQEDFYPF
LKDNREKIEKILTFRIPYYVGPLARGNSRFAWMTRKSEETITPWNFEEVVDKGASAQSFIER
MTNFDKNLPNEKVLPKHSLLYEYFTVYNELTKVKYVTEGMRKPAFLSGEQKKAIVDLLFKTN
RKVTVKQLKEDYFKKIECFDSVEISGVEDRFNASLGTYHDLLKIIKDKDFLDNEENEDILED
IVLTLTLFEDREMIEERLKTYAHLFDDKVMKQLKRRRYTGWGRLSRKLINGIRDKQSGKTIL
DFLKSDGFANRNFMQLIHDDSLTFKEDIQKAQVSGQGDSLHEHIANLAGSPAIKKGILQTVK
VVDELVKVMGRHKPENIVIEMARENQTTQKGQKNSRERMKRIEEGIKELGSQILKEHPVENT
QLQNEKLYLYYLQNGRDMYVDQELDINRLSDYDVDHIVPQSFLKDDSIDNKVLTRSDKNRGK
SDNVPSEEVVKKMKNYWRQLLNAKLITQRKFDNLTKAERGGLSELDKAGFIKRQLVETRQIT
KHVAQILDSRMNTKYDENDKLIREVKVITLKSKLVSDFRKDFQFYKVREINNYHHAHDAYLN
AVVGTALIKKYPKLESEFVYGDYKVYDVRKMIAKSEQEGADKRTADGSEFESPKKKRKV*

[0692] In the above sequence, the plain text denotes an adenosine deaminase sequence, bold sequence indicates sequence derived from Cas9, the italics sequence denotes a linker sequence, and the underlined sequence denotes a bipartite nuclear localization sequence.

[0693] In some embodiments, the base editor is ABE8.14, which comprises or consists essentially of the following sequence or a fragment thereof having adenosine deaminase activity:

pNMG-357_ABE8.14 with NGC PAM CP5
MSEVEFSHEYWMRHALTLAKRAWDEREVPVGAVLVHNNRVIGEGWNRPIGRHDPTAHAEIMA
LRQGGLVMQNYRLIDATLYVTLEPCVMCAGAMIHSRIGRVVFGARDAKTGAAGSLMDVLHHP
GMNHRVEITEGILADECAALLSDFFRMRRQEIKAQKKAQSSTDGGSSGGSSGSETPGTSESA
TPESSGGSSGGSMSEVEFSHEYWMRHALTLAKRARDEREVPVGAVLVLNNRVIGEGWNRAIG
LHDPTAHAEIMALRQGGLVMQNYRLIDATLYVTFEPCVMCAGAMIHSRIGRVVFGVRNAKTG
AAGSLMDVLHYPGMNHRVEITEGILADECAALLCTFFRMPRQVFNAQKKAQSSTDSGGSSGG
SSGSETPGTSESATPESSGGSSGGSEIGKATAKYFFYSNIMNFFKTEITLANGEIRKRPLIE
TNGETGEIVWDKGRDFATVRKVLSMPQVNIVKKTEVQTGGFSKESILPKRNSDKLIARKKDW
DPKKYGGFMQPTVAYSVLVVAKVEKGKSKKLKSVKELLGITIMERSSFEKNPIDFLEAKGYK
EVKKDLIIKLPKYSLFELENGRKRMLASAKFLQKGNELALPSKYVNFLYLASHYEKLKGSPE
DNEQKQLFVEQHKHYLDEIIEQISEFSKRVILADANLDKVLSAYNKHRDKPIREQAENIIHL
FTLTNLGAPRAFKYFDTTIARKEYRSTKEVLDATLIHQSITGLYETRIDLSQLGGDGGSGGS
GGSGGSGGSGGSGGMDKKYSIGLAIGTNSVGWAVITDEYKVPSKKFKVLGNTDRHSIKKNLI
GALLFDSGETAEATRLKRTARRRYTRRKNRICYLQEIFSNEMAKVDDSFFHRLEESFLVEED
KKHERHPIFGNIVDEVAYHEKYPTIYHLRKKLVDSTDKADLRLIYLALAHMIKFRGHFLIEG
DLNPDNSDVDKLFIQLVQTYNQLFEENPINASGVDAKAILSARLSKSRRLENLIAQLPGEKK
NGLFGNLIALSLGLTPNFKSNFDLAEDAKLQLSKDTYDDDLDNLLAQIGDQYADLFLAAKNL
SDAILLSDILRVNTEITKAPLSASMIKRYDEHHQDLTLLKALVRQQLPEKYKEIFFDQSKNG
YAGYIDGGASQEEFYKFIKPILEKMDGTEELLVKLNREDLLRKQRTFDNGSIPHQIHLGELH
AILRRQEDFYPFLKDNREKIEKILTFRIPYYVGPLARGNSRFAWMTRKSEETITPWNFEEVV
DKGASAQSFIERMTNFDKNLPNEKVLPKHSLLYEYFTVYNELTKVKYVTEGMRKPAFLSGEQ
KKAIVDLLFKTNRKVTVKQLKEDYFKKIECFDSVEISGVEDRFNASLGTYHDLLKIIKDKDF
LDNEENEDILEDIVLTLTLFEDREMIEERLKTYAHLFDDKVMKQLKRRRYTGWGRLSRKLIN
GIRDKQSGKTILDFLKSDGFANRNFMQLIHDDSLTFKEDIQKAQVSGQGDSLHEHIANLAGS
PAIKKGILQTVKVVDELVKVMGRHKPENIVIEMARENQTTQKGQKNSRERMKRIEEGIKELG
SQILKEHPVENTQLQNEKLYLYYLQNGRDMYVDQELDINRLSDYDVDHIVPQSFLKDDSIDN
KVLTRSDKNRGKSDNVPSEEVVKKMKNYWRQLLNAKLITQRKFDNLTKAERGGLSELDKAGF
IKRQLVETRQITKHVAQILDSRMNTKYDENDKLIREVKVITLKSKLVSDFRKDFQFYKVREI
NNYHHAHDAYLNAVVGTALIKKYPKLESEFVYGDYKVYDVRKMIAKSEQEGADKRTADGSEF
ESPKKKRKV*

[0694] In the above sequence, the plain text denotes an adenosine deaminase sequence, bold sequence indicates sequence derived from Cas9, the italics sequence denotes a linker sequence, and the underlined sequence denotes a bipartite nuclear localization sequence.

[0695] In some embodiments, the base editor is ABE8.8-m, which comprises or consists essentially of the following sequence or a fragment thereof having adenosine deaminase activity:

ABE8.8-m
MSEVEFSHEYWMRHALTLAKRARDEREVPVGAVLVLNNRVIGEGWNRAIGLHDPTAHAEIMA
LRQGGLVMQNYRLIDATLYVTFEPCVMCAGAMIHSRIGRVVFGVRNAKTGAAGSLMDVLHHP
GMNHRVEITEGILADECAALLCRFFRMPRRVFNAQKKAQSSTDSGGSSGGSSGSETPGTSES
ATPESSGGSSGGSDKKYSIGL [symbol] IGTNSVGWAVITDEYKVPSKKFKVLGNTDRHSIKKNLIGA
LLFDSGETAEATRLKRTARRRYTRRKNRICYLQEIFSNEMAKVDDSFFHRLEESFLVEEDKK
HERHPIFGNIVDEVAYHEKYPTIYHLRKKLVDSTDKADLRLIYLALAHMIKFRGHFLIEGDL
NPDNSDVDKLFIQLVQTYNQLFEENPINASGVDAKAILSARLSKSRRLENLIAQLPGEKKNG
LFGNLIALSLGLTPNFKSNFDLAEDAKLQLSKDTYDDDLDNLLAQIGDQYADLFLAAKNLSD
AlLLSDILRVNTEITKAPLSASMIKRYDEHHQDLTLLKALVRQQLPEKYKEIFFDQSKNGYA
GYIDGGASQEEFYKFIKPILEKMDGTEELLVKLNREDLLRKQRTFDNGSIPHQIHLGELHAI
LRRQEDFYPFLKDNREKIEKILTFRIPYYVGPLARGNSRFAWMTRKSEETITPWNFEEVVDK
GASAQSFIERMTNFDKNLPNEKVLPKHSLLYEYFTVYNELTKVKYVTEGMRKPAFLSGEQKK
AIVDLLFKTNRKVTVKQLKEDYFKKIECFDSVEISGVEDRFNASLGTYHDLLKIIKDKDFLD
NEENEDILEDIVLTLTLFEDREMIEERLKTYAHLFDDKVMKQLKRRRYTGWGRLSRKLINGI
RDKQSGKTILDFLKSDGFANRNFMQLIHDDSLTFKEDIQKAQVSGQGDSLHEHIANLAGSPA
IKKGILQTVKVVDELVKVMGRHKPENIVIEMARENQTTQKGQKNSRERMKRIEEGIKELGSQ
ILKEHPVENTQLQNEKLYLYYLQNGRDMYVDQELDINRLSDYDVDHIVPQSFLKDDSIDNKV
LTRSDKNRGKSDNVPSEEVVKKMKNYWRQLLNAKLITQRKFDNLTKAERGGLSELDKAGFIK
RQLVETRQITKHVAQILDSRMNTKYDENDKLIREVKVITLKSKLVSDFRKDFQFYKVREINN
YHHAHDAYLNAVVGTALIKKYPKLESEFVYGDYKVYDVRKMIAKSEQEIGKATAKYFFYSNI
MNFFKTEITLANGEIRKRPLIETNGETGEIVWDKGRDFATVRKVLSMPQVNIVKKTEVQTGG
FSKESILPKRNSDKLIARKKDWDPKKYGGFDSPTVAYSVLVVAKVEKGKSKKLKSVKELLGI
TIMERSSFEKNPIDFLEAKGYKEVKKDLIIKLPKYSLFELENGRKRMLASAGELQKGNELAL
PSKYVNFLYLASHYEKLKGSPEDNEQKQLFVEQHKHYLDEIIEQISEFSKRVILADANLDKV
LSAYNKHRDKPIREQAENIIHLFTLTNLGAPAAFKYFDTTIDRKRYTSTKEVLDATLIHQSI
TGLYETRIDLSQLGGDEGADKRTADGSEFESPKKKRKV*

[0696] In the above sequence, the plain text denotes an adenosine deaminase sequence, bold sequence indicates sequence derived from Cas9, the italicized sequence denotes a linker sequence, underlined sequence denotes a bipartite nuclear localization sequence, and double underlined sequence indicates mutations.

[0697] In some embodiments, the base editor is ABE8.8-d, which comprises or consists essentially of the following sequence or a fragment thereof having adenosine deaminase activity:

ABE8.8-d
mSEVEFSHEYWMRHALTLAKRAWDEREVPVGAVLVHNNRVIGEGWNRPIGRHDPTAHAEIMA
LRQGGLVMQNYRLIDATLYVTLEPCVMCAGAMIHSRIGRVVFGARDAKTGAAGSLMDVLHHP
GMNHRVEITEGILADECAALLSDFFRMRRQEIKAQKKAQSSTDSGGSSGGSSGSETPGTSES
ATPESSGGSSGGSSEVEFSHEYWMRHALTLAKRARDEREVPVGAVLVLNNRVIGEGWNRAIG
LHDPTAHAEIMALRQGGLVMQNYRLIDATLYVTFEPCVMCAGAMIHSRIGRVVFGVRNAKTG
AAGSLMDVLHHPGMNHRVEITEGILADECAALLCRFFRMPRRVFNAQKKAQSSTDSGGSSGG
SSGSETPGTSESATPESSGGSSGGSDKKYSIGL [symbol] IGTNSVGWAVITDEYKVPSKKFKVLGNT
DRHSIKKNLIGALLFDSGETAEATRLKRTARRRYTRRKNRICYLQEIFSNEMAKVDDSFFHR
LEESFLVEEDKKHERHPIFGNIVDEVAYHEKYPTIYHLRKKLVDSTDKADLRLIYLALAHMI
KFRGHFLIEGDLNPDNSDVDKLFIQLVQTYNQLFEENPINASGVDAKAILSARLSKSRRLEN
LIAQLPGEKKNGLFGNLIALSLGLTPNFKSNFDLAEDAKLQLSKDTYDDDLDNLLAQIGDQY
ADLFLAAKNLSDAILLSDILRVNTEITKAPLSASMIKRYDEHHQDLTLLKALVRQQLPEKYK
EIFFDQSKNGYAGYIDGGASQEEFYKFIKPILEKMDGTEELLVKLNREDLLRKQRTFDNGSI
PHQIHLGELHAILRRQEDFYPFLKDNREKIEKILTFRIPYYVGPLARGNSRFAWMTRKSEET
ITPWNFEEVVDKGASAQSFIERMTNFDKNLPNEKVLPKHSLLYEYFTVYNELTKVKYVTEGM
RKPAFLSGEQKKAIVDLLFKTNRKVTVKQLKEDYFKKIECFDSVEISGVEDRFNASLGTYHD
LLKIIKDKDFLDNEENEDILEDIVLTLTLFEDREMIEERLKTYAHLFDDKVMKQLKRRRYTG
WGRLSRKLINGIRDKQSGKTILDFLKSDGFANRNFMQLIHDDSLTFKEDIQKAQVSGQGDSL
HEHIANLAGSPAIKKGILQTVKVVDELVKVMGRHKPENIVIEMARENQTTQKGQKNSRERMK
RIEEGIKELGSQILKEHPVENTQLQNEKLYLYYLQNGRDMYVDQELDINRLSDYDVDHIVPQ
SFLKDDSIDNKVLTRSDKNRGKSDNVPSEEVVKKMKNYWRQLLNAKLITQRKFDNLTKAERG
GLSELDKAGFIKRQLVETRQITKHVAQILDSRMNTKYDENDKLIREVKVITLKSKLVSDFRK
DFQFYKVREINNYHHAHDAYLNAVVGTALIKKYPKLESEFVYGDYKVYDVRKMIAKSEQEIG
KATAKYFFYSNIMNFFKTEITLANGEIRKRPLIETNGETGEIVWDKGRDFATVRKVLSMPQV
NIVKKTEVQTGGFSKESILPKRNSDKLIARKKDWDPKKYGGFDSPTVAYSVLVVAKVEKGKS
KKLKSVKELLGITIMERSSFEKNPIDFLEAKGYKEVKKDLIIKLPKYSLFELENGRKRMLAS
AGELQKGNELALPSKYVNFLYLASHYEKLKGSPEDNEQKQLFVEQHKHYLDEIIEQISEFSK
RVILADANLDKVLSAYNKHRDKPIREQAENIIHLFTLTNLGAPAAFKYFDTTIDRKRYTSTK
EVLDATLIHQSITGLYETRIDLSQLGGDEGADKRTADGSEFESPKKKRKV*

[0698] In the above sequence, the plain text denotes an adenosine deaminase sequence, bold sequence indicates sequence derived from Cas9, the italicized sequence denotes a linker sequence, underlined sequence denotes a bipartite nuclear localization sequence, and double underlined sequence indicates mutations.

[0699] In some embodiments, the base editor is ARE8.13-m, which comprises or consists essentially of the following sequence or a fragment thereof having adenosine deaminase activity:

ABE8.13-m
MSEVEFSHEYWMRHALTLAKRARDEREVPVGAVLVLNNRVIGEGWNRAIGLHDPTAHAEIMA
LRQGGLVMQNYRLYDATLYVTFEPCVMCAGAMIHSRIGRVVFGVRNAKTGAAGSLMDVLHHP
GMNHRVEITEGILADECAALLCRFFRMPRRVFNAQKKAQSSTDSGGSSGGSSGSETPGTSES
ATPESSGGSSGGSDKKYSIGL [symbol] IGTNSVGWAVITDEYKVPSKKFKVLGNTDRHSIKKNLIGA
LLFDSGETAEATRLKRTARRRYTRRKNRICYLQEIFSNEMAKVDDSFFHRLEESFLVEEDKK
HERHPIFGNIVDEVAYHEKYPTIYHLRKKLVDSTDKADLRLIYLALAHMIKFRGHFLIEGDL
NPDNSDVDKLFIQLVQTYNQLFEENPINASGVDAKAILSARLSKSRRLENLIAQLPGEKKNG
LFGNLIALSLGLTPNFKSNFDLAEDAKLQLSKDTYDDDLDNLLAQIGDQYADLFLAAKNLSD
AlLLSDILRVNTEITKAPLSASMIKRYDEHHQDLTLLKALVRQQLPEKYKEIFFDQSKNGYA
GYIDGGASQEEFYKFIKPILEKMDGTEELLVKLNREDLLRKQRTFDNGSIPHQIHLGELHAI
LRRQEDFYPFLKDNREKIEKILTFRIPYYVGPLARGNSRFAWMTRKSEETITPWNFEEVVDK
GASAQSFIERMTNFDKNLPNEKVLPKHSLLYEYFTVYNELTKVKYVTEGMRKPAFLSGEQKK
AIVDLLFKTNRKVTVKQLKEDYFKKIECFDSVEISGVEDRFNASLGTYHDLLKIIKDKDFLD
NEENEDILEDIVLTLTLFEDREMIEERLKTYAHLFDDKVMKQLKRRRYTGWGRLSRKLINGI
RDKQSGKTILDFLKSDGFANRNFMQLIHDDSLTFKEDIQKAQVSGQGDSLHEHIANLAGSPA
IKKGILQTVKVVDELVKVMGRHKPENIVIEMARENQTTQKGQKNSRERMKRIEEGIKELGSQ
ILKEHPVENTQLQNEKLYLYYLQNGRDMYVDQELDINRLSDYDVDHIVPQSFLKDDSIDNKV
LTRSDKNRGKSDNVPSEEVVKKMKNYWRQLLNAKLITQRKFDNLTKAERGGLSELDKAGFIK
RQLVETRQITKHVAQILDSRMNTKYDENDKLIREVKVITLKSKLVSDFRKDFQFYKVREINN
YHHAHDAYLNAVVGTALIKKYPKLESEFVYGDYKVYDVRKMIAKSEQEIGKATAKYFFYSNI
MNFFKTEITLANGEIRKRPLIETNGETGEIVWDKGRDFATVRKVLSMPQVNIVKKTEVQTGG
FSKESILPKRNSDKLIARKKDWDPKKYGGFDSPTVAYSVLVVAKVEKGKSKKLKSVKELLGI
TIMERSSFEKNPIDFLEAKGYKEVKKDLIIKLPKYSLFELENGRKRMLASAGELQKGNELAL
PSKYVNFLYLASHYEKLKGSPEDNEQKQLFVEQHKHYLDEIIEQISEFSKRVILADANLDKV
LSAYNKHRDKPIREQAENIIHLFTLTNLGAPAAFKYFDTTIDRKRYTSTKEVLDATLIHQSI
TGLYETRIDLSQLGGDEGADKRTADGSEFESPKKKRKV*

[0700] In the above sequence, the plain text denotes an adenosine deaminase sequence, bold sequence indicates sequence derived from Cas9, the italicized sequence denotes a linker sequence, underlined sequence denotes a bipartite nuclear localization sequence, and double underlined sequence indicates mutations.

[0701] In some embodiments, the base editor is ABE8.13-d, which comprises or consists essentially of the following sequence or a fragment thereof having adenosine deaminase activity:

ABE8.13-d
MSEVEFSHEYWMRHALTLAKRAWDEREVPVGAVLVHNNRVIGEGWNRPIGRHDPTAHAEIMA
LRQGGLVMQNYRLIDATLYVTLEPCVMCAGAMIHSRIGRVVFGARDAKTGAAGSLMDVLHHP
GMNHRVEITEGILADECAALLSDFFRMRRQEIKAQKKAQSSTDSGGSSGGSSGSETPGTSES
ATPESSGGSSGGSSEVEFSHEYWMRHALTLAKRARDEREVPVGAVLVLNNRVIGEGWNRAIG
LHDPTAHAEIMALRQGGLVMQNYRLYDATLYVTFEPCVMCAGAMIHSRIGRVVFGVRNAKTG
AAGSLMDVLHHPGMNHRVEITEGILADECAALLCRFFRMPRRVFNAQKKAQSSTDSGGSSGG
SSGSETPGTSESATPESSGGSSGGSDKKYSIGL [symbol] IGTNSVGWAVITDEYKVPSKKFKVLGNT
DRHSIKKNLIGALLFDSGETAEATRLKRTARRRYTRRKNRICYLQEIFSNEMAKVDDSFFHR
LEESFLVEEDKKHERHPIFGNIVDEVAYHEKYPTIYHLRKKLVDSTDKADLRLIYLALAHMI
KFRGHFLIEGDLNPDNSDVDKLFIQLVQTYNQLFEENPINASGVDAKAILSARLSKSRRLEN
LIAQLPGEKKNGLFGNLIALSLGLTPNFKSNFDLAEDAKLQLSKDTYDDDLDNLLAQIGDQY
ADLFLAAKNLSDAILLSDILRVNTEITKAPLSASMIKRYDEHHQDLTLLKALVRQQLPEKYK
EIFFDQSKNGYAGYIDGGASQEEFYKFIKPILEKMDGTEELLVKLNREDLLRKQRTFDNGSI
PHQIHLGELHAILRRQEDFYPFLKDNREKIEKILTFRIPYYVGPLARGNSRFAWMTRKSEET
ITPWNFEEVVDKGASAQSFIERMTNFDKNLPNEKVLPKHSLLYEYFTVYNELTKVKYVTEGM
RKPAFLSGEQKKAIVDLLFKTNRKVTVKQLKEDYFKKIECFDSVEISGVEDRFNASLGTYHD
LLKIIKDKDFLDNEENEDILEDIVLTLTLFEDREMIEERLKTYAHLFDDKVMKQLKRRRYTG
WGRLSRKLINGIRDKQSGKTILDFLKSDGFANRNFMQLIHDDSLTFKEDIQKAQVSGQGDSL
HEHIANLAGSPAIKKGILQTVKVVDELVKVMGRHKPENIVIEMARENQTTQKGQKNSRERMK
RIEEGIKELGSQILKEHPVENTQLQNEKLYLYYLQNGRDMYVDQELDINRLSDYDVDHIVPQ
SFLKDDSIDNKVLTRSDKNRGKSDNVPSEEVVKKMKNYWRQLLNAKLITQRKFDNLTKAERG
GLSELDKAGFIKRQLVETRQITKHVAQILDSRMNTKYDENDKLIREVKVITLKSKLVSDFRK
DFQFYKVREINNYHHAHDAYLNAVVGTALIKKYPKLESEFVYGDYKVYDVRKMIAKSEQEIG
KATAKYFFYSNIMNFFKTEITLANGEIRKRPLIETNGETGEIVWDKGRDFATVRKVLSMPQV
NIVKKTEVQTGGFSKESILPKRNSDKLIARKKDWDPKKYGGFDSPTVAYSVLVVAKVEKGKS
KKLKSVKELLGITIMERSSFEKNPIDFLEAKGYKEVKKDLIIKLPKYSLFELENGRKRMLAS
AGELQKGNELALPSKYVNFLYLASHYEKLKGSPEDNEQKQLFVEQHKHYLDEIIEQISEFSK
RVILADANLDKVLSAYNKHRDKPIREQAENIIHLFTLTNLGAPAAFKYFDTTIDRKRYTSTK
EVLDATLIHQSITGLYETRIDLSQLGGDEGADKRTADGSEFESPKKKRKV*

[0702] In the above sequence, the plain text denotes an adenosine deaminase sequence, bold sequence indicates sequence derived from Cas9, the italicized sequence denotes a linker sequence, underlined sequence denotes a bipartite nuclear localization sequence, and double underlined sequence indicates mutations.

[0703] In some embodiments, the base editor is ARE8.17-m, which comprises or consists essentially of the following sequence or a fragment thereof having adenosine deaminase activity:

ABE8.17-m
MSEVEFSHEYWMRHALTLAKRARDEREVPVGAVLVLNNRVIGEGWNRAIG
LHDPTAHAEIMALRQGGLVMQNYRLIDATLYSTFEPCVMCAGAMIHSRIG
RVVFGVRNAKTGAAGSLMDVLHYPGMNHRVEITEGILADECAALLCYFFR
MPRRVFNAQKKAQSSTDSGGSSGGSSGSETPGTSESATPESSGGSSGGSD
KKYSIGL [symbol] IGTNSVGWAVITDEYKVPSKKFKVLGNTDRHSIKKNLIGALL
FDSGETAEATRLKRTARRRYTRRKNRICYLQEIFSNEMAKVDDSFFHRLE
ESFLVEEDKKHERHPIFGNIVDEVAYHEKYPTIYHLRKKLVDSTDKADLR
LIYLALAHMIKFRGHFLIEGDLNPDNSDVDKLFIQLVQTYNQLFEENPIN
ASGVDAKAILSARLSKSRRLENLIAQLPGEKKNGLFGNLIALSLGLTPNF
KSNFDLAEDAKLQLSKDTYDDDLDNLLAQIGDQYADLFLAAKNLSDAILL
SDILRVNTEITKAPLSASMIKRYDEHHQDLTLLKALVRQQLPEKYKEIFF
DQSKNGYAGYIDGGASQEEFYKFIKPILEKMDGTEELLVKLNREDLLRKQ
RTFDNGSIPHQIHLGELHAILRRQEDFYPFLKDNREKIEKILTFRIPYYV
GPLARGNSRFAWMTRKSEETITPWNFEEVVDKGASAQSFIERMTNFDKNL
PNEKVLPKHSLLYEYFTVYNELTKVKYVTEGMRKPAFLSGEQKKAIVDLL
FKTNRKVTVKQLKEDYFKKIECFDSVEISGVEDRFNASLGTYHDLLKIIK
DKDFLDNEENEDILEDIVLTLTLFEDREMIEERLKTYAHLFDDKVMKQLK
RRRYTGWGRLSRKLINGIRDKQSGKTILDFLKSDGFANRNFMQLIHDDSL
TFKEDIQKAQVSGQGDSLHEHIANLAGSPAIKKGILQTVKVVDELVKVMG
RHKPENIVIEMARENQTTQKGQKNSRERMKRIEEGIKELGSQILKEHPVE
NTQLQNEKLYLYYLQNGRDMYVDQELDINRLSDYDVDHIVPQSFLKDDSI
DNKVLTRSDKNRGKSDNVPSEEVVKKMKNYWRQLLNAKLITQRKFDNLTK
AERGGLSELDKAGFIKRQLVETRQITKHVAQILDSRMNTKYDENDKLIRE
VKVITLKSKLVSDFRKDFQFYKVREINNYHHAHDAYLNAVVGTALIKKYP
KLESEFVYGDYKVYDVRKMIAKSEQEIGKATAKYFFYSNIMNFFKTEITL
ANGEIRKRPLIETNGETGEIVWDKGRDFATVRKVLSMPQVNIVKKTEVQT
GGFSKESILPKRNSDKLIARKKDWDPKKYGGFDSPTVAYSVLVVAKVEKG
KSKKLKSVKELLGITIMERSSFEKNPIDFLEAKGYKEVKKDLIIKLPKYS
LFELENGRKRMLASAGELQKGNELALPSKYVNFLYLASHYEKLKGSPEDN
EQKQLFVEQHKHYLDEIIEQISEFSKRVILADANLDKVLSAYNKHRDKPI
REQAENIIHLFTLTNLGAPAAFKYFDTTIDRKRYTSTKEVLDATLIHQSI
TGLYETRIDLSQLGGDEGADKRTADGSEFESPKKKRKV*

[0704] In the above sequence, the plain text denotes an adenosine deaminase sequence, bold sequence indicates sequence derived from Cas9, the italicized sequence denotes a linker sequence, underlined sequence denotes a bipartite nuclear localization sequence, and double underlined sequence indicates mutations.

[0705] In some embodiments, the base editor is ABE8.17-d, which comprises or consists essentially of the following sequence or a fragment thereof having adenosine deaminase activity:

ABE8.17-d
MSEVEFSHEYWMRHALTLAKRAWDEREVPVGAVLVHNNRVIGEGWNRPIG
RHDPTAHAEIMALRQGGLVMQNYRLIDATLYVTLEPCVMCAGAMIHSRIG
RVVFGARDAKTGAAGSLMDVLHHPGMNHRVEITEGILADECAALLSDFFR
MRRQEIKAQKKAQSSTDSGGSSGGSSGSETPGTSESATPESSGGSSGGSS
EVEFSHEYWMRHALTLAKRARDEREVPVGAVLVLNNRVIGEGWNRAIGLH
DPTAHAEIMALRQGGLVMQNYRLIDATLYSTFEPCVMCAGAMIHSRIGRV
VFGVRNAKTGAAGSLMDVLHYPGMNHRVEITEGILADECAALLCYFFRMP
RRVFNAQKKAQSSTDSGGSSGGSSGSETPGTSESATPESSGGSSGGSDKK
YSIGL [symbol] IGTNSVGWAVITDEYKVPSKKFKVLGNTDRHSIKKNLIGALLFD
SGETAEATRLKRTARRRYTRRKNRICYLQEIFSNEMAKVDDSFFHRLEES
FLVEEDKKHERHPIFGNIVDEVAYHEKYPTIYHLRKKLVDSTDKADLRLI
YLALAHMIKFRGHFLIEGDLNPDNSDVDKLFIQLVQTYNQLFEENPINAS
GVDAKAILSARLSKSRRLENLIAQLPGEKKNGLFGNLIALSLGLTPNFKS
NFDLAEDAKLQLSKDTYDDDLDNLLAQIGDQYADLFLAAKNLSDAILLSD
ILRVNTEITKAPLSASMIKRYDEHHQDLTLLKALVRQQLPEKYKEIFFDQ
SKNGYAGYIDGGASQEEFYKFIKPILEKMDGTEELLVKLNREDLLRKQRT
FDNGSIPHQIHLGELHAILRRQEDFYPFLKDNREKIEKILTFRIPYYVGP
LARGNSRFAWMTRKSEETITPWNFEEVVDKGASAQSFIERMTNFDKNLPN
EKVLPKHSLLYEYFTVYNELTKVKYVTEGMRKPAFLSGEQKKAIVDLLFK
TNRKVTVKQLKEDYFKKIECFDSVEISGVEDRFNASLGTYHDLLKIIKDK
DFLDNEENEDILEDIVLTLTLFEDREMIEERLKTYAHLFDDKVMKQLKRR
RYTGWGRLSRKLINGIRDKQSGKTILDFLKSDGFANRNFMQLIHDDSLTF
KEDIQKAQVSGQGDSLHEHIANLAGSPAIKKGILQTVKVVDELVKVMGRH
KPENIVIEMARENQTTQKGQKNSRERMKRIEEGIKELGSQILKEHPVENT
QLQNEKLYLYYLQNGRDMYVDQELDINRLSDYDVDHIVPQSFLKDDSIDN
KVLTRSDKNRGKSDNVPSEEVVKKMKNYWRQLLNAKLITQRKFDNLTKAE
RGGLSELDKAGFIKRQLVETRQITKHVAQILDSRMNTKYDENDKLIREVK
VITLKSKLVSDFRKDFQFYKVREINNYHHAHDAYLNAVVGTALIKKYPKL
ESEFVYGDYKVYDVRKMIAKSEQEIGKATAKYFFYSNIMNFFKTEITLAN
GEIRKRPLIETNGETGEIVWDKGRDFATVRKVLSMPQVNIVKKTEVQTGG
FSKESILPKRNSDKLIARKKDWDPKKYGGFDSPTVAYSVLVVAKVEKGKS
KKLKSVKELLGITIMERSSFEKNPIDFLEAKGYKEVKKDLIIKLPKYSLF
ELENGRKRMLASAGELQKGNELALPSKYVNFLYLASHYEKLKGSPEDNEQ
KQLFVEQHKHYLDEIIEQISEFSKRVILADANLDKVLSAYNKHRDKPIRE
QAENIIHLFTLTNLGAPAAFKYFDTTIDRKRYTSTKEVLDATLIHQSITG
LYETRIDLSQLGGDEGADKRTADGSEFESPKKKRKV*

[0706] In the above sequence, the plain text denotes an adenosine deaminase sequence, bold sequence indicates sequence derived from Cas9, the italicized sequence denotes a linker sequence, underlined sequence denotes a bipartite nuclear localization sequence, and double underlined sequence indicates mutations.

[0707] In some embodiments, the base editor is ABE8.20-m, which comprises or consists essentially of the following sequence or a fragment thereof having adenosine deaminase activity:

ABE8.20-m
MSEVEFSHEYWMRHALTLAKRARDEREVPVGAVLVLNNRVIGEGWNRAIG
LHDPTAHAEIMALRQGGLVMQNYRLYDATLYSTFEPCVMCAGAMIHSRIG
RVVFGVRNAKTGAAGSLMDVLHHPGMNHRVEITEGILADECAALLCRFFR
MPRRVFNAQKKAQSSTDSGGSSGGSSGSETPGTSESATPESSGGSSGGSD
KKYSIGL [symbol] IGTNSVGWAVITDEYKVPSKKFKVLGNTDRHSIKKNLIGALL
FDSGETAEATRLKRTARRRYTRRKNRICYLQEIFSNEMAKVDDSFFHRLE
ESFLVEEDKKHERHPIFGNIVDEVAYHEKYPTIYHLRKKLVDSTDKADLR
LIYLALAHMIKFRGHFLIEGDLNPDNSDVDKLFIQLVQTYNQLFEENPIN
ASGVDAKAILSARLSKSRRLENLIAQLPGEKKNGLFGNLIALSLGLTPNF
KSNFDLAEDAKLQLSKDTYDDDLDNLLAQIGDQYADLFLAAKNLSDAILL
SDILRVNTEITKAPLSASMIKRYDEHHQDLTLLKALVRQQLPEKYKEIFF
DQSKNGYAGYIDGGASQEEFYKFIKPILEKMDGTEELLVKLNREDLLRKQ
RTFDNGSIPHQIHLGELHAILRRQEDFYPFLKDNREKIEKILTFRIPYYV
GPLARGNSRFAWMTRKSEETITPWNFEEVVDKGASAQSFIERMTNFDKNL
PNEKVLPKHSLLYEYFTVYNELTKVKYVTEGMRKPAFLSGEQKKAIVDLL
FKTNRKVTVKQLKEDYFKKIECFDSVEISGVEDRFNASLGTYHDLLKIIK
DKDFLDNEENEDILEDIVLTLTLFEDREMIEERLKTYAHLFDDKVMKQLK
RRRYTGWGRLSRKLINGIRDKQSGKTILDFLKSDGFANRNFMQLIHDDSL
TFKEDIQKAQVSGQGDSLHEHIANLAGSPAIKKGILQTVKVVDELVKVMG
RHKPENIVIEMARENQTTQKGQKNSRERMKRIEEGIKELGSQILKEHPVE
NTQLQNEKLYLYYLQNGRDMYVDQELDINRLSDYDVDHIVPQSFLKDDSI
DNKVLTRSDKNRGKSDNVPSEEVVKKMKNYWRQLLNAKLITQRKFDNLTK
AERGGLSELDKAGFIKRQLVETRQITKHVAQILDSRMNTKYDENDKLIRE
VKVITLKSKLVSDFRKDFQFYKVREINNYHHAHDAYLNAVVGTALIKKYP
KLESEFVYGDYKVYDVRKMIAKSEQEIGKATAKYFFYSNIMNFFKTEITL
ANGEIRKRPLIETNGETGEIVWDKGRDFATVRKVLSMPQVNIVKKTEVQT
GGFSKESILPKRNSDKLIARKKDWDPKKYGGFDSPTVAYSVLVVAKVEKG
KSKKLKSVKELLGITIMERSSFEKNPIDFLEAKGYKEVKKDLIIKLPKYS
LFELENGRKRMLASAGELQKGNELALPSKYVNFLYLASHYEKLKGSPEDN
EQKQLFVEQHKHYLDEIIEQISEFSKRVILADANLDKVLSAYNKHRDKPI
REQAENIIHLFTLTNLGAPAAFKYFDTTIDRKRYTSTKEVLDATLIHQSI
TGLYETRIDLSQLGGDEGADKRTADGSEFESPKKKRKV*

[0708] In the above sequence, the plain text denotes an adenosine deaminase sequence, bold sequence indicates sequence derived from Cas9, the italicized sequence denotes a linker sequence, underlined sequence denotes a bipartite nuclear localization sequence, and double underlined sequence indicates mutations.

[0709] In some embodiments, the base editor is ABE8.20-d, which comprises or consists essentially of the following sequence or a fragment thereof having adenosine deaminase activity:

ABE8.20-d
MSEVEFSHEYWMRHALTLAKRAWDEREVPVGAVLVHNNRVIGEGWNRPIG
RHDPTAHAEIMALRQGGLVMQNYRLIDATLYVTLEPCVMCAGAMIHSRIG
RVVFGARDAKTGAAGSLMDVLHHPGMNHRVEITEGILADECAALLSDFFR
MRRQEIKAQKKAQSSTDSGGSSGGSSGSETPGTSESATPESSGGSSGGSS
EVEFSHEYWMRHALTLAKRARDEREVPVGAVLVLNNRVIGEGWNRAIGLH
DPTAHAEIMALRQGGLVMQNYRLYDATLYSTFEPCVMCAGAMIHSRIGRV
VFGVRNAKTGAAGSLMDVLHHPGMNHRVEITEGILADECAALLCRFFRMP
RRVFNAQKKAQSSTDSGGSSGGSSGSETPGTSESATPESSGGSSGGSDKK
YSIGL [symbol] IGTNSVGWAVITDEYKVPSKKFKVLGNTDRHSIKKNLIGALLFD
SGETAEATRLKRTARRRYTRRKNRICYLQEIFSNEMAKVDDSFFHRLEES
FLVEEDKKHERHPIFGNIVDEVAYHEKYPTIYHLRKKLVDSTDKADLRLI
YLALAHMIKFRGHFLIEGDLNPDNSDVDKLFIQLVQTYNQLFEENPINAS
GVDAKAILSARLSKSRRLENLIAQLPGEKKNGLFGNLIALSLGLTPNFKS
NFDLAEDAKLQLSKDTYDDDLDNLLAQIGDQYADLFLAAKNLSDAILLSD
ILRVNTEITKAPLSASMIKRYDEHHQDLTLLKALVRQQLPEKYKEIFFDQ
SKNGYAGYIDGGASQEEFYKFIKPILEKMDGTEELLVKLNREDLLRKQRT
FDNGSIPHQIHLGELHAILRRQEDFYPFLKDNREKIEKILTFRIPYYVGP
LARGNSRFAWMTRKSEETITPWNFEEVVDKGASAQSFIERMTNFDKNLPN
EKVLPKHSLLYEYFTVYNELTKVKYVTEGMRKPAFLSGEQKKAIVDLLFK
TNRKVTVKQLKEDYFKKIECFDSVEISGVEDRFNASLGTYHDLLKIIKDK
DFLDNEENEDILEDIVLTLTLFEDREMIEERLKTYAHLFDDKVMKQLKRR
RYTGWGRLSRKLINGIRDKQSGKTILDFLKSDGFANRNFMQLIHDDSLTF
KEDIQKAQVSGQGDSLHEHIANLAGSPAIKKGILQTVKVVDELVKVMGRH
KPENIVIEMARENQTTQKGQKNSRERMKRIEEGIKELGSQILKEHPVENT
QLQNEKLYLYYLQNGRDMYVDQELDINRLSDYDVDHIVPQSFLKDDSIDN
KVLTRSDKNRGKSDNVPSEEVVKKMKNYWRQLLNAKLITQRKFDNLTKAE
RGGLSELDKAGFIKRQLVETRQITKHVAQILDSRMNTKYDENDKLIREVK
VITLKSKLVSDFRKDFQFYKVREINNYHHAHDAYLNAVVGTALIKKYPKL
ESEFVYGDYKVYDVRKMIAKSEQEIGKATAKYFFYSNIMNFFKTEITLAN
GEIRKRPLIETNGETGEIVWDKGRDFATVRKVLSMPQVNIVKKTEVQTGG
FSKESILPKRNSDKLIARKKDWDPKKYGGFDSPTVAYSVLVVAKVEKGKS
KKLKSVKELLGITIMERSSFEKNPIDFLEAKGYKEVKKDLIIKLPKYSLF
ELENGRKRMLASAGELQKGNELALPSKYVNFLYLASHYEKLKGSPEDNEQ
KQLFVEQHKHYLDEIIEQISEFSKRVILADANLDKVLSAYNKHRDKPIRE
QAENIIHLFTLTNLGAPAAFKYFDTTIDRKRYTSTKEVLDATLIHQSITG
LYETRIDLSQLGGDEGADKRTADGSEFESPKKKRKV*

[0710] In the above sequence, the plain text denotes an adenosine deaminase sequence, bold sequence indicates sequence derived from Cas9, the italicized sequence denotes a linker sequence, underlined sequence denotes a bipartite nuclear localization sequence, and double underlined sequence indicates mutations.

[0711] In some embodiments, an ABE8 of the invention is selected from the following sequences:

01. monoABE8.1_bpNLS + Y147T
MSEVEFSHEYWMRHALTLAKRARDEREVPVGAVLVLNNRVIGEGWNRAIGLHDPTAHAEIMA
LRQGGLVMQNYRLIDATLYVTFEPCVMCAGAMIHSRIGRVVFGVRNAKTGAAGSLMDVLHYP
GMNHRVEITEGILADECAALLCTFFRMPRQVFNAQKKAQSSTDSGGSSGGSSGSETPGTSES
ATPESSGGSSGGSDKKYSIGLAIGTNSVGWAVITDEYKVPSKKFKVLGNTDRHSIKKNLIGA
LLFDSGETAEATRLKRTARRRYTRRKNRICYLQEIFSNEMAKVDDSFFHRLEESFLVEEDKK
HERHPIFGNIVDEVAYHEKYPTIYHLRKKLVDSTDKADLRLIYLALAHMIKFRGHFLIEGDL
NPDNSDVDKLFIQLVQTYNQLFEENPINASGVDAKAILSARLSKSRRLENLIAQLPGEKKNG
LFGNLIALSLGLTPNFKSNFDLAEDAKLQLSKDTYDDDLDNLLAQIGDQYADLFLAAKNLSD
AILLSDILRVNTEITKAPLSASMIKRYDEHHQDLTLLKALVRQQLPEKYKEIFFDQSKNGYA
GYIDGGASQEEFYKFIKPILEKMDGTEELLVKLNREDLLRKQRTFDNGSIPHQIHLGELHAI
LRRQEDFYPFLKDNREKIEKILTFRIPYYVGPLARGNSRFAWMTRKSEETITPWNFEEVVDK
GASAQSFIERMTNFDKNLPNEKVLPKHSLLYEYFTVYNELTKVKYVTEGMRKPAFLSGEQKK
AIVDLLFKTNRKVTVKQLKEDYFKKIECFDSVEISGVEDRFNASLGTYHDLLKIIKDKDFLD
NEENEDILEDIVLTLTLFEDREMIEERLKTYAHLFDDKVMKQLKRRRYTGWGRLSRKLINGI
RDKQSGKTILDFLKSDGFANRNFMQLIHDDSLTFKEDIQKAQVSGQGDSLHEHIANLAGSPA
IKKGILQTVKVVDELVKVMGRHKPENIVIEMARENQTTQKGQKNSRERMKRIEEGIKELGSQ
ILKEHPVENTQLQNEKLYLYYLQNGRDMYVDQELDINRLSDYDVDHIVPQSFLKDDSIDNKV
LTRSDKNRGKSDNVPSEEVVKKMKNYWRQLLNAKLITQRKFDNLTKAERGGLSELDKAGFIK
RQLVETRQITKHVAQILDSRMNTKYDENDKLIREVKVITLKSKLVSDFRKDFQFYKVREINN
YHHAHDAYLNAVVGTALIKKYPKLESEFVYGDYKVYDVRKMIAKSEQEIGKATAKYFFYSNI
MNFFKTEITLANGEIRKRPLIETNGETGEIVWDKGRDFATVRKVLSMPQVNIVKKTEVQTGG
FSKESILPKRNSDKLIARKKDWDPKKYGGFVSPTVAYSVLVVAKVEKGKSKKLKSVKELLGI
TIMERSSFEKNPIDFLEAKGYKEVKKDLIIKLPKYSLFELENGRKRMLASARELQKGNELAL
PSKYVNFLYLASHYEKLKGSPEDNEQKQLFVEQHKHYLDEIIEQISEFSKRVILADANLDKV
LSAYNKHRDKPIREQAENIIHLFTLTNLGAPAAFKYFDTTIDRKQYRSTKEVLDATLIHQSI
TGLYETRIDLSQLGGDEGADKRTADGSEFESPKKKRKV
02. monoABE8.1_bpNLS + Y147R
MSEVEFSHEYWMRHALTLAKRARDEREVPVGAVLVLNNRVIGEGWNRAIGLHDPTAHAEIMA
LRQGGLVMQNYRLIDATLYVTFEPCVMCAGAMIHSRIGRVVFGVRNAKTGAAGSLMDVLHYP
GMNHRVEITEGILADECAALLCRFFRMPRQVFNAQKKAQSSTDSGGSSGGSSGSETPGTSES
ATPESSGGSSGGSDKKYSIGLAIGTNSVGWAVITDEYKVPSKKFKVLGNTDRHSIKKNLIGA
LLFDSGETAEATRLKRTARRRYTRRKNRICYLQEIFSNEMAKVDDSFFHRLEESFLVEEDKK
HERHPIFGNIVDEVAYHEKYPTIYHLRKKLVDSTDKADLRLIYLALAHMIKFRGHFLIEGDL
NPDNSDVDKLFIQLVQTYNQLFEENPINASGVDAKAILSARLSKSRRLENLIAQLPGEKKNG
LFGNLIALSLGLTPNFKSNFDLAEDAKLQLSKDTYDDDLDNLLAQIGDQYADLFLAAKNLSD
AILLSDILRVNTEITKAPLSASMIKRYDEHHQDLTLLKALVRQQLPEKYKEIFFDQSKNGYA
GYIDGGASQEEFYKFIKPILEKMDGTEELLVKLNREDLLRKQRTFDNGSIPHQIHLGELHAI
LRRQEDFYPFLKDNREKIEKILTFRIPYYVGPLARGNSRFAWMTRKSEETITPWNFEEVVDK
GASAQSFIERMTNFDKNLPNEKVLPKHSLLYEYFTVYNELTKVKYVTEGMRKPAFLSGEQKK
AIVDLLFKTNRKVTVKQLKEDYFKKIECFDSVEISGVEDRFNASLGTYHDLLKIIKDKDFLD
NEENEDILEDIVLTLTLFEDREMIEERLKTYAHLFDDKVMKQLKRRRYTGWGRLSRKLINGI
RDKQSGKTILDFLKSDGFANRNFMQLIHDDSLTFKEDIQKAQVSGQGDSLHEHIANLAGSPA
IKKGILQTVKVVDELVKVMGRHKPENIVIEMARENQTTQKGQKNSRERMKRIEEGIKELGSQ
ILKEHPVENTQLQNEKLYLYYLQNGRDMYVDQELDINRLSDYDVDHIVPQSFLKDDSIDNKV
LTRSDKNRGKSDNVPSEEVVKKMKNYWRQLLNAKLITQRKFDNLTKAERGGLSELDKAGFIK
RQLVETRQITKHVAQILDSRMNTKYDENDKLIREVKVITLKSKLVSDFRKDFQFYKVREINN
YHHAHDAYLNAVVGTALIKKYPKLESEFVYGDYKVYDVRKMIAKSEQEIGKATAKYFFYSNI
MNFFKTEITLANGEIRKRPLIETNGETGEIVWDKGRDFATVRKVLSMPQVNIVKKTEVQTGG
FSKESILPKRNSDKLIARKKDWDPKKYGGFVSPTVAYSVLVVAKVEKGKSKKLKSVKELLGI
TIMERSSFEKNPIDFLEAKGYKEVKKDLIIKLPKYSLFELENGRKRMLASARELQKGNELAL
PSKYVNFLYLASHYEKLKGSPEDNEQKQLFVEQHKHYLDEIIEQISEFSKRVILADANLDKV
LSAYNKHRDKPIREQAENIIHLFTLTNLGAPAAFKYFDTTIDRKQYRSTKEVLDATLIHQSI
TGLYETRIDLSQLGGDEGADKRTADGSEFESPKKKRKV
03. monoABE8.1_bpNLS + Q154S
MSEVEFSHEYWMRHALTLAKRARDEREVPVGAVLVLNNRVIGEGWNRAIGLHDPTAHAEIMA
LRQGGLVMQNYRLIDATLYVTFEPCVMCAGAMIHSRIGRVVFGVRNAKTGAAGSLMDVLHYP
GMNHRVEITEGILADECAALLCYFFRMPRSVFNAQKKAQSSTDSGGSSGGSSGSETPGTSES
ATPESSGGSSGGSDKKYSIGLAIGTNSVGWAVITDEYKVPSKKFKVLGNTDRHSIKKNLIGA
LLFDSGETAEATRLKRTARRRYTRRKNRICYLQEIFSNEMAKVDDSFFHRLEESFLVEEDKK
HERHPIFGNIVDEVAYHEKYPTIYHLRKKLVDSTDKADLRLIYLALAHMIKFRGHFLIEGDL
NPDNSDVDKLFIQLVQTYNQLFEENPINASGVDAKAILSARLSKSRRLENLIAQLPGEKKNG
LFGNLIALSLGLTPNFKSNFDLAEDAKLQLSKDTYDDDLDNLLAQIGDQYADLFLAAKNLSD
AILLSDILRVNTEITKAPLSASMIKRYDEHHQDLTLLKALVRQQLPEKYKEIFFDQSKNGYA
GYIDGGASQEEFYKFIKPILEKMDGTEELLVKLNREDLLRKQRTFDNGSIPHQIHLGELHAI
LRRQEDFYPFLKDNREKIEKILTFRIPYYVGPLARGNSRFAWMTRKSEETITPWNFEEVVDK
GASAQSFIERMTNFDKNLPNEKVLPKHSLLYEYFTVYNELTKVKYVTEGMRKPAFLSGEQKK
AIVDLLFKTNRKVTVKQLKEDYFKKIECFDSVEISGVEDRFNASLGTYHDLLKIIKDKDFLD
NEENEDILEDIVLTLTLFEDREMIEERLKTYAHLFDDKVMKQLKRRRYTGWGRLSRKLINGI
RDKQSGKTILDFLKSDGFANRNFMQLIHDDSLTFKEDIQKAQVSGQGDSLHEHIANLAGSPA
IKKGILQTVKVVDELVKVMGRHKPENIVIEMARENQTTQKGQKNSRERMKRIEEGIKELGSQ
ILKEHPVENTQLQNEKLYLYYLQNGRDMYVDQELDINRLSDYDVDHIVPQSFLKDDSIDNKV
LTRSDKNRGKSDNVPSEEVVKKMKNYWRQLLNAKLITQRKFDNLTKAERGGLSELDKAGFIK
RQLVETRQITKHVAQILDSRMNTKYDENDKLIREVKVITLKSKLVSDFRKDFQFYKVREINN
YHHAHDAYLNAVVGTALIKKYPKLESEFVYGDYKVYDVRKMIAKSEQEIGKATAKYFFYSNI
MNFFKTEITLANGEIRKRPLIETNGETGEIVWDKGRDFATVRKVLSMPQVNIVKKTEVQTGG
FSKESILPKRNSDKLIARKKDWDPKKYGGFVSPTVAYSVLVVAKVEKGKSKKLKSVKELLGI
TIMERSSFEKNPIDFLEAKGYKEVKKDLIIKLPKYSLFELENGRKRMLASARELQKGNELAL
PSKYVNFLYLASHYEKLKGSPEDNEQKQLFVEQHKHYLDEIIEQISEFSKRVILADANLDKV
LSAYNKHRDKPIREQAENIIHLFTLTNLGAPAAFKYFDTTIDRKQYRSTKEVLDATLIHQSI
TGLYETRIDLSQLGGDEGADKRTADGSEFESPKKKRKV
04. monoABE8.1_bpNLS + Y123H
MSEVEFSHEYWMRHALTLAKRARDEREVPVGAVLVLNNRVIGEGWNRAIGLHDPTAHAEIMA
LRQGGLVMQNYRLIDATLYVTFEPCVMCAGAMIHSRIGRVVFGVRNAKTGAAGSLMDVLHHP
GMNHRVEITEGILADECAALLCYFFRMPRQVFNAQKKAQSSTDSGGSSGGSSGSETPGTSES
ATPESSGGSSGGSDKKYSIGLAIGTNSVGWAVITDEYKVPSKKFKVLGNTDRHSIKKNLIGA
LLFDSGETAEATRLKRTARRRYTRRKNRICYLQEIFSNEMAKVDDSFFHRLEESFLVEEDKK
HERHPIFGNIVDEVAYHEKYPTIYHLRKKLVDSTDKADLRLIYLALAHMIKFRGHFLIEGDL
NPDNSDVDKLFIQLVQTYNQLFEENPINASGVDAKAILSARLSKSRRLENLIAQLPGEKKNG
LFGNLIALSLGLTPNFKSNFDLAEDAKLQLSKDTYDDDLDNLLAQIGDQYADLFLAAKNLSD
AILLSDILRVNTEITKAPLSASMIKRYDEHHQDLTLLKALVRQQLPEKYKEIFFDQSKNGYA
GYIDGGASQEEFYKFIKPILEKMDGTEELLVKLNREDLLRKQRTFDNGSIPHQIHLGELHAI
LRRQEDFYPFLKDNREKIEKILTFRIPYYVGPLARGNSRFAWMTRKSEETITPWNFEEVVDK
GASAQSFIERMTNFDKNLPNEKVLPKHSLLYEYFTVYNELTKVKYVTEGMRKPAFLSGEQKK
AIVDLLFKTNRKVTVKQLKEDYFKKIECFDSVEISGVEDRFNASLGTYHDLLKIIKDKDFLD
NEENEDILEDIVLTLTLFEDREMIEERLKTYAHLFDDKVMKQLKRRRYTGWGRLSRKLINGI
RDKQSGKTILDFLKSDGFANRNFMQLIHDDSLTFKEDIQKAQVSGQGDSLHEHIANLAGSPA
IKKGILQTVKVVDELVKVMGRHKPENIVIEMARENQTTQKGQKNSRERMKRIEEGIKELGSQ
ILKEHPVENTQLQNEKLYLYYLQNGRDMYVDQELDINRLSDYDVDHIVPQSFLKDDSIDNKV
LTRSDKNRGKSDNVPSEEVVKKMKNYWRQLLNAKLITQRKFDNLTKAERGGLSELDKAGFIK
RQLVETRQITKHVAQILDSRMNTKYDENDKLIREVKVITLKSKLVSDFRKDFQFYKVREINN
YHHAHDAYLNAVVGTALIKKYPKLESEFVYGDYKVYDVRKMIAKSEQEIGKATAKYFFYSNI
MNFFKTEITLANGEIRKRPLIETNGETGEIVWDKGRDFATVRKVLSMPQVNIVKKTEVQTGG
FSKESILPKRNSDKLIARKKDWDPKKYGGFVSPTVAYSVLVVAKVEKGKSKKLKSVKELLGI
TIMERSSFEKNPIDFLEAKGYKEVKKDLIIKLPKYSLFELENGRKRMLASARELQKGNELAL
PSKYVNFLYLASHYEKLKGSPEDNEQKQLFVEQHKHYLDEIIEQISEFSKRVILADANLDKV
LSAYNKHRDKPIREQAENIIHLFTLTNLGAPAAFKYFDTTIDRKQYRSTKEVLDATLIHQSI
TGLYETRIDLSQLGGDEGADKRTADGSEFESPKKKRKV
05. monoABE8.1_bpNLS + V82S
MSEVEFSHEYWMRHALTLAKRARDEREVPVGAVLVLNNRVIGEGWNRAIGLHDPTAHAEIMA
LRQGGLVMQNYRLIDATLYSTFEPCVMCAGAMIHSRIGRVVFGVRNAKTGAAGSLMDVLHYP
GMNHRVEITEGILADECAALLCYFFRMPRQVFNAQKKAQSSTDSGGSSGGSSGSETPGTSES
ATPESSGGSSGGSDKKYSIGLAIGTNSVGWAVITDEYKVPSKKFKVLGNTDRHSIKKNLIGA
LLFDSGETAEATRLKRTARRRYTRRKNRICYLQEIFSNEMAKVDDSFFHRLEESFLVEEDKK
HERHPIFGNIVDEVAYHEKYPTIYHLRKKLVDSTDKADLRLIYLALAHMIKFRGHFLIEGDL
NPDNSDVDKLFIQLVQTYNQLFEENPINASGVDAKAILSARLSKSRRLENLIAQLPGEKKNG
LFGNLIALSLGLTPNFKSNFDLAEDAKLQLSKDTYDDDLDNLLAQIGDQYADLFLAAKNLSD
AILLSDILRVNTEITKAPLSASMIKRYDEHHQDLTLLKALVRQQLPEKYKEIFFDQSKNGYA
GYIDGGASQEEFYKFIKPILEKMDGTEELLVKLNREDLLRKQRTFDNGSIPHQIHLGELHAI
LRRQEDFYPFLKDNREKIEKILTFRIPYYVGPLARGNSRFAWMTRKSEETITPWNFEEVVDK
GASAQSFIERMTNFDKNLPNEKVLPKHSLLYEYFTVYNELTKVKYVTEGMRKPAFLSGEQKK
AIVDLLFKTNRKVTVKQLKEDYFKKIECFDSVEISGVEDRFNASLGTYHDLLKIIKDKDFLD
NEENEDILEDIVLTLTLFEDREMIEERLKTYAHLFDDKVMKQLKRRRYTGWGRLSRKLINGI
RDKQSGKTILDFLKSDGFANRNFMQLIHDDSLTFKEDIQKAQVSGQGDSLHEHIANLAGSPA
IKKGILQTVKVVDELVKVMGRHKPENIVIEMARENQTTQKGQKNSRERMKRIEEGIKELGSQ
ILKEHPVENTQLQNEKLYLYYLQNGRDMYVDQELDINRLSDYDVDHIVPQSFLKDDSIDNKV
LTRSDKNRGKSDNVPSEEVVKKMKNYWRQLLNAKLITQRKFDNLTKAERGGLSELDKAGFIK
RQLVETRQITKHVAQILDSRMNTKYDENDKLIREVKVITLKSKLVSDFRKDFQFYKVREINN
YHHAHDAYLNAVVGTALIKKYPKLESEFVYGDYKVYDVRKMIAKSEQEIGKATAKYFFYSNI
MNFFKTEITLANGEIRKRPLIETNGETGEIVWDKGRDFATVRKVLSMPQVNIVKKTEVQTGG
FSKESILPKRNSDKLIARKKDWDPKKYGGFVSPTVAYSVLVVAKVEKGKSKKLKSVKELLGI
TIMERSSFEKNPIDFLEAKGYKEVKKDLIIKLPKYSLFELENGRKRMLASARELQKGNELAL
PSKYVNFLYLASHYEKLKGSPEDNEQKQLFVEQHKHYLDEIIEQISEFSKRVILADANLDKV
LSAYNKHRDKPIREQAENIIHLFTLTNLGAPAAFKYFDTTIDRKQYRSTKEVLDATLIHQSI
TGLYETRIDLSQLGGDEGADKRTADGSEFESPKKKRKV
06. monoABE8.1_bpNLS + T166R
MSEVEFSHEYWMRHALTLAKRARDEREVPVGAVLVLNNRVIGEGWNRAIGLHDPTAHAEIMA
LRQGGLVMQNYRLIDATLYVTFEPCVMCAGAMIHSRIGRVVFGVRNAKTGAAGSLMDVLHYP
GMNHRVEITEGILADECAALLCYFFRMPRQVFNAQKKAQSSRDSGGSSGGSSGSETPGTSES
ATPESSGGSSGGSDKKYSIGLAIGTNSVGWAVITDEYKVPSKKFKVLGNTDRHSIKKNLIGA
LLFDSGETAEATRLKRTARRRYTRRKNRICYLQEIFSNEMAKVDDSFFHRLEESFLVEEDKK
HERHPIFGNIVDEVAYHEKYPTIYHLRKKLVDSTDKADLRLIYLALAHMIKFRGHFLIEGDL
NPDNSDVDKLFIQLVQTYNQLFEENPINASGVDAKAILSARLSKSRRLENLIAQLPGEKKNG
LFGNLIALSLGLTPNFKSNFDLAEDAKLQLSKDTYDDDLDNLLAQIGDQYADLFLAAKNLSD
AILLSDILRVNTEITKAPLSASMIKRYDEHHQDLTLLKALVRQQLPEKYKEIFFDQSKNGYA
GYIDGGASQEEFYKFIKPILEKMDGTEELLVKLNREDLLRKQRTFDNGSIPHQIHLGELHAI
LRRQEDFYPFLKDNREKIEKILTFRIPYYVGPLARGNSRFAWMTRKSEETITPWNFEEVVDK
GASAQSFIERMTNFDKNLPNEKVLPKHSLLYEYFTVYNELTKVKYVTEGMRKPAFLSGEQKK
AIVDLLFKTNRKVTVKQLKEDYFKKIECFDSVEISGVEDRFNASLGTYHDLLKIIKDKDFLD
NEENEDILEDIVLTLTLFEDREMIEERLKTYAHLFDDKVMKQLKRRRYTGWGRLSRKLINGI
RDKQSGKTILDFLKSDGFANRNFMQLIHDDSLTFKEDIQKAQVSGQGDSLHEHIANLAGSPA
IKKGILQTVKVVDELVKVMGRHKPENIVIEMARENQTTQKGQKNSRERMKRIEEGIKELGSQ
ILKEHPVENTQLQNEKLYLYYLQNGRDMYVDQELDINRLSDYDVDHIVPQSFLKDDSIDNKV
LTRSDKNRGKSDNVPSEEVVKKMKNYWRQLLNAKLITQRKFDNLTKAERGGLSELDKAGFIK
RQLVETRQITKHVAQILDSRMNTKYDENDKLIREVKVITLKSKLVSDFRKDFQFYKVREINN
YHHAHDAYLNAVVGTALIKKYPKLESEFVYGDYKVYDVRKMIAKSEQEIGKATAKYFFYSNI
MNFFKTEITLANGEIRKRPLIETNGETGEIVWDKGRDFATVRKVLSMPQVNIVKKTEVQTGG
FSKESILPKRNSDKLIARKKDWDPKKYGGFVSPTVAYSVLVVAKVEKGKSKKLKSVKELLGI
TIMERSSFEKNPIDFLEAKGYKEVKKDLIIKLPKYSLFELENGRKRMLASARELQKGNELAL
PSKYVNFLYLASHYEKLKGSPEDNEQKQLFVEQHKHYLDEIIEQISEFSKRVILADANLDKV
LSAYNKHRDKPIREQAENIIHLFTLTNLGAPAAFKYFDTTIDRKQYRSTKEVLDATLIHQSI
TGLYETRIDLSQLGGDEGADKRTADGSEFESPKKKRKV
07. monoABE8.1_bpNLS + Q154R
MSEVEFSHEYWMRHALTLAKRARDEREVPVGAVLVLNNRVIGEGWNRAIGLHDPTAHAEIMA
LRQGGLVMQNYRLIDATLYVTFEPCVMCAGAMIHSRIGRVVFGVRNAKTGAAGSLMDVLHYP
GMNHRVEITEGILADECAALLCYFFRMPRRVFNAQKKAQSSTDSGGSSGGSSGSETPGTSES
ATPESSGGSSGGSDKKYSIGLAIGTNSVGWAVITDEYKVPSKKFKVLGNTDRHSIKKNLIGA
LLFDSGETAEATRLKRTARRRYTRRKNRICYLQEIFSNEMAKVDDSFFHRLEESFLVEEDKK
HERHPIFGNIVDEVAYHEKYPTIYHLRKKLVDSTDKADLRLIYLALAHMIKFRGHFLIEGDL
NPDNSDVDKLFIQLVQTYNQLFEENPINASGVDAKAILSARLSKSRRLENLIAQLPGEKKNG
LFGNLIALSLGLTPNFKSNFDLAEDAKLQLSKDTYDDDLDNLLAQIGDQYADLFLAAKNLSD
AILLSDILRVNTEITKAPLSASMIKRYDEHHQDLTLLKALVRQQLPEKYKEIFFDQSKNGYA
GYIDGGASQEEFYKFIKPILEKMDGTEELLVKLNREDLLRKQRTFDNGSIPHQIHLGELHAI
LRRQEDFYPFLKDNREKIEKILTFRIPYYVGPLARGNSRFAWMTRKSEETITPWNFEEVVDK
GASAQSFIERMTNFDKNLPNEKVLPKHSLLYEYFTVYNELTKVKYVTEGMRKPAFLSGEQKK
AIVDLLFKTNRKVTVKQLKEDYFKKIECFDSVEISGVEDRFNASLGTYHDLLKIIKDKDFLD
NEENEDILEDIVLTLTLFEDREMIEERLKTYAHLFDDKVMKQLKRRRYTGWGRLSRKLINGI
RDKQSGKTILDFLKSDGFANRNFMQLIHDDSLTFKEDIQKAQVSGQGDSLHEHIANLAGSPA
IKKGILQTVKVVDELVKVMGRHKPENIVIEMARENQTTQKGQKNSRERMKRIEEGIKELGSQ
ILKEHPVENTQLQNEKLYLYYLQNGRDMYVDQELDINRLSDYDVDHIVPQSFLKDDSIDNKV
LTRSDKNRGKSDNVPSEEVVKKMKNYWRQLLNAKLITQRKFDNLTKAERGGLSELDKAGFIK
RQLVETRQITKHVAQILDSRMNTKYDENDKLIREVKVITLKSKLVSDFRKDFQFYKVREINN
YHHAHDAYLNAVVGTALIKKYPKLESEFVYGDYKVYDVRKMIAKSEQEIGKATAKYFFYSNI
MNFFKTEITLANGEIRKRPLIETNGETGEIVWDKGRDFATVRKVLSMPQVNIVKKTEVQTGG
FSKESILPKRNSDKLIARKKDWDPKKYGGFVSPTVAYSVLVVAKVEKGKSKKLKSVKELLGI
TIMERSSFEKNPIDFLEAKGYKEVKKDLIIKLPKYSLFELENGRKRMLASARELQKGNELAL
PSKYVNFLYLASHYEKLKGSPEDNEQKQLFVEQHKHYLDEIIEQISEFSKRVILADANLDKV
LSAYNKHRDKPIREQAENIIHLFTLTNLGAPAAFKYFDTTIDRKQYRSTKEVLDATLIHQSI
TGLYETRIDLSQLGGDEGADKRTADGSEFESPKKKRKV
08. monoABE8.1_bpNLS + Y147R_Q154R_Y123H
MSEVEFSHEYWMRHALTLAKRARDEREVPVGAVLVLNNRVIGEGWNRAIGLHDPTAHAEIMA
LRQGGLVMQNYRLIDATLYVTFEPCVMCAGAMIHSRIGRVVFGVRNAKTGAAGSLMDVLHHP
GMNHRVEITEGILADECAALLCRFFRMPRRVFNAQKKAQSSTDSGGSSGGSSGSETPGTSES
ATPESSGGSSGGSDKKYSIGLAIGTNSVGWAVITDEYKVPSKKFKVLGNTDRHSIKKNLIGA
LLFDSGETAEATRLKRTARRRYTRRKNRICYLQEIFSNEMAKVDDSFFHRLEESFLVEEDKK
HERHPIFGNIVDEVAYHEKYPTIYHLRKKLVDSTDKADLRLIYLALAHMIKFRGHFLIEGDL
NPDNSDVDKLFIQLVQTYNQLFEENPINASGVDAKAILSARLSKSRRLENLIAQLPGEKKNG
LFGNLIALSLGLTPNFKSNFDLAEDAKLQLSKDTYDDDLDNLLAQIGDQYADLFLAAKNLSD
AILLSDILRVNTEITKAPLSASMIKRYDEHHQDLTLLKALVRQQLPEKYKEIFFDQSKNGYA
GYIDGGASQEEFYKFIKPILEKMDGTEELLVKLNREDLLRKQRTFDNGSIPHQIHLGELHAI
LRRQEDFYPFLKDNREKIEKILTFRIPYYVGPLARGNSRFAWMTRKSEETITPWNFEEVVDK
GASAQSFIERMTNFDKNLPNEKVLPKHSLLYEYFTVYNELTKVKYVTEGMRKPAFLSGEQKK
AIVDLLFKTNRKVTVKQLKEDYFKKIECFDSVEISGVEDRFNASLGTYHDLLKIIKDKDFLD
NEENEDILEDIVLTLTLFEDREMIEERLKTYAHLFDDKVMKQLKRRRYTGWGRLSRKLINGI
RDKQSGKTILDFLKSDGFANRNFMQLIHDDSLTFKEDIQKAQVSGQGDSLHEHIANLAGSPA
IKKGILQTVKVVDELVKVMGRHKPENIVIEMARENQTTQKGQKNSRERMKRIEEGIKELGSQ
ILKEHPVENTQLQNEKLYLYYLQNGRDMYVDQELDINRLSDYDVDHIVPQSFLKDDSIDNKV
LTRSDKNRGKSDNVPSEEVVKKMKNYWRQLLNAKLITQRKFDNLTKAERGGLSELDKAGFIK
RQLVETRQITKHVAQILDSRMNTKYDENDKLIREVKVITLKSKLVSDFRKDFQFYKVREINN
YHHAHDAYLNAVVGTALIKKYPKLESEFVYGDYKVYDVRKMIAKSEQEIGKATAKYFFYSNI
MNFFKTEITLANGEIRKRPLIETNGETGEIVWDKGRDFATVRKVLSMPQVNIVKKTEVQTGG
FSKESILPKRNSDKLIARKKDWDPKKYGGFVSPTVAYSVLVVAKVEKGKSKKLKSVKELLGI
TIMERSSFEKNPIDFLEAKGYKEVKKDLIIKLPKYSLFELENGRKRMLASARELQKGNELAL
PSKYVNFLYLASHYEKLKGSPEDNEQKQLFVEQHKHYLDEIIEQISEFSKRVILADANLDKV
LSAYNKHRDKPIREQAENIIHLFTLTNLGAPAAFKYFDTTIDRKQYRSTKEVLDATLIHQSI
TGLYETRIDLSQLGGDEGADKRTADGSEFESPKKKRKV
09. monoABE8.1_bpNLS + Y147R_Q154R_176Y
MSEVEFSHEYWMRHALTLAKRARDEREVPVGAVLVLNNRVIGEGWNRAIGLHDPTAHAEIMA
LRQGGLVMQNYRLYDATLYVTFEPCVMCAGAMIHSRIGRVVFGVRNAKTGAAGSLMDVLHYP
GMNHRVEITEGILADECAALLCRFFRMPRRVFNAQKKAQSSTDSGGSSGGSSGSETPGTSES
ATPESSGGSSGGSDKKYSIGLAIGTNSVGWAVITDEYKVPSKKFKVLGNTDRHSIKKNLIGA
LLFDSGETAEATRLKRTARRRYTRRKNRICYLQEIFSNEMAKVDDSFFHRLEESFLVEEDKK
HERHPIFGNIVDEVAYHEKYPTIYHLRKKLVDSTDKADLRLIYLALAHMIKFRGHFLIEGDL
NPDNSDVDKLFIQLVQTYNQLFEENPINASGVDAKAILSARLSKSRRLENLIAQLPGEKKNG
LFGNLIALSLGLTPNFKSNFDLAEDAKLQLSKDTYDDDLDNLLAQIGDQYADLFLAAKNLSD
AILLSDILRVNTEITKAPLSASMIKRYDEHHQDLTLLKALVRQQLPEKYKEIFFDQSKNGYA
GYIDGGASQEEFYKFIKPILEKMDGTEELLVKLNREDLLRKQRTFDNGSIPHQIHLGELHAI
LRRQEDFYPFLKDNREKIEKILTFRIPYYVGPLARGNSRFAWMTRKSEETITPWNFEEVVDK
GASAQSFIERMTNFDKNLPNEKVLPKHSLLYEYFTVYNELTKVKYVTEGMRKPAFLSGEQKK
AIVDLLFKTNRKVTVKQLKEDYFKKIECFDSVEISGVEDRFNASLGTYHDLLKIIKDKDFLD
NEENEDILEDIVLTLTLFEDREMIEERLKTYAHLFDDKVMKQLKRRRYTGWGRLSRKLINGI
RDKQSGKTILDFLKSDGFANRNFMQLIHDDSLTFKEDIQKAQVSGQGDSLHEHIANLAGSPA
IKKGILQTVKVVDELVKVMGRHKPENIVIEMARENQTTQKGQKNSRERMKRIEEGIKELGSQ
ILKEHPVENTQLQNEKLYLYYLQNGRDMYVDQELDINRLSDYDVDHIVPQSFLKDDSIDNKV
LTRSDKNRGKSDNVPSEEVVKKMKNYWRQLLNAKLITQRKFDNLTKAERGGLSELDKAGFIK
RQLVETRQITKHVAQILDSRMNTKYDENDKLIREVKVITLKSKLVSDFRKDFQFYKVREINN
YHHAHDAYLNAVVGTALIKKYPKLESEFVYGDYKVYDVRKMIAKSEQEIGKATAKYFFYSNI
MNFFKTEITLANGEIRKRPLIETNGETGEIVWDKGRDFATVRKVLSMPQVNIVKKTEVQTGG
FSKESILPKRNSDKLIARKKDWDPKKYGGFVSPTVAYSVLVVAKVEKGKSKKLKSVKELLGI
TIMERSSFEKNPIDFLEAKGYKEVKKDLIIKLPKYSLFELENGRKRMLASARELQKGNELAL
PSKYVNFLYLASHYEKLKGSPEDNEQKQLFVEQHKHYLDEIIEQISEFSKRVILADANLDKV
LSAYNKHRDKPIREQAENIIHLFTLTNLGAPAAFKYFDTTIDRKQYRSTKEVLDATLIHQSI
TGLYETRIDLSQLGGDEGADKRTADGSEFESPKKKRKV
10. monoABE8.1_bpNLS + Y147R_Q154R_T166R
MSEVEFSHEYWMRHALTLAKRARDEREVPVGAVLVLNNRVIGEGWNRAIGLHDPTAHAEIMA
LRQGGLVMQNYRLIDATLYVTFEPCVMCAGAMIHSRIGRVVFGVRNAKTGAAGSLMDVLHYP
GMNHRVEITEGILADECAALLCRFFRMPRRVFNAQKKAQSSRDSGGSSGGSSGSETPGTSES
ATPESSGGSSGGSDKKYSIGLAIGTNSVGWAVITDEYKVPSKKFKVLGNTDRHSIKKNLIGA
LLFDSGETAEATRLKRTARRRYTRRKNRICYLQEIFSNEMAKVDDSFFHRLEESFLVEEDKK
HERHPIFGNIVDEVAYHEKYPTIYHLRKKLVDSTDKADLRLIYLALAHMIKFRGHFLIEGDL
NPDNSDVDKLFIQLVQTYNQLFEENPINASGVDAKAILSARLSKSRRLENLIAQLPGEKKNG
LFGNLIALSLGLTPNFKSNFDLAEDAKLQLSKDTYDDDLDNLLAQIGDQYADLFLAAKNLSD
AILLSDILRVNTEITKAPLSASMIKRYDEHHQDLTLLKALVRQQLPEKYKEIFFDQSKNGYA
GYIDGGASQEEFYKFIKPILEKMDGTEELLVKLNREDLLRKQRTFDNGSIPHQIHLGELHAI
LRRQEDFYPFLKDNREKIEKILTFRIPYYVGPLARGNSRFAWMTRKSEETITPWNFEEVVDK
GASAQSFIERMTNFDKNLPNEKVLPKHSLLYEYFTVYNELTKVKYVTEGMRKPAFLSGEQKK
AIVDLLFKTNRKVTVKQLKEDYFKKIECFDSVEISGVEDRFNASLGTYHDLLKIIKDKDFLD
NEENEDILEDIVLTLTLFEDREMIEERLKTYAHLFDDKVMKQLKRRRYTGWGRLSRKLINGI
RDKQSGKTILDFLKSDGFANRNFMQLIHDDSLTFKEDIQKAQVSGQGDSLHEHIANLAGSPA
IKKGILQTVKVVDELVKVMGRHKPENIVIEMARENQTTQKGQKNSRERMKRIEEGIKELGSQ
ILKEHPVENTQLQNEKLYLYYLQNGRDMYVDQELDINRLSDYDVDHIVPQSFLKDDSIDNKV
LTRSDKNRGKSDNVPSEEVVKKMKNYWRQLLNAKLITQRKFDNLTKAERGGLSELDKAGFIK
RQLVETRQITKHVAQILDSRMNTKYDENDKLIREVKVITLKSKLVSDFRKDFQFYKVREINN
YHHAHDAYLNAVVGTALIKKYPKLESEFVYGDYKVYDVRKMIAKSEQEIGKATAKYFFYSNI
MNFFKTEITLANGEIRKRPLIETNGETGEIVWDKGRDFATVRKVLSMPQVNIVKKTEVQTGG
FSKESILPKRNSDKLIARKKDWDPKKYGGFVSPTVAYSVLVVAKVEKGKSKKLKSVKELLGI
TIMERSSFEKNPIDFLEAKGYKEVKKDLIIKLPKYSLFELENGRKRMLASARELQKGNELAL
PSKYVNFLYLASHYEKLKGSPEDNEQKQLFVEQHKHYLDEIIEQISEFSKRVILADANLDKV
LSAYNKHRDKPIREQAENIIHLFTLTNLGAPAAFKYFDTTIDRKQYRSTKEVLDATLIHQSI
TGLYETRIDLSQLGGDEGADKRTADGSEFESPKKKRKV
11. monoABE8.1_ bpNLS + Y147T_Q154R
MSEVEFSHEYWMRHALTLAKRARDEREVPVGAVLVLNNRVIGEGWNRAIGLHDPTAHAEIMA
LRQGGLVMQNYRLIDATLYVTFEPCVMCAGAMIHSRIGRVVFGVRNAKTGAAGSLMDVLHYP
GMNHRVEITEGILADECAALLCTFFRMPRRVFNAQKKAQSSTDSGGSSGGSSGSETPGTSES
ATPESSGGSSGGSDKKYSIGLAIGTNSVGWAVITDEYKVPSKKFKVLGNTDRHSIKKNLIGA
LLFDSGETAEATRLKRTARRRYTRRKNRICYLQEIFSNEMAKVDDSFFHRLEESFLVEEDKK
HERHPIFGNIVDEVAYHEKYPTIYHLRKKLVDSTDKADLRLIYLALAHMIKFRGHFLIEGDL
NPDNSDVDKLFIQLVQTYNQLFEENPINASGVDAKAILSARLSKSRRLENLIAQLPGEKKNG
LFGNLIALSLGLTPNFKSNFDLAEDAKLQLSKDTYDDDLDNLLAQIGDQYADLFLAAKNLSD
AILLSDILRVNTEITKAPLSASMIKRYDEHHQDLTLLKALVRQQLPEKYKEIFFDQSKNGYA
GYIDGGASQEEFYKFIKPILEKMDGTEELLVKLNREDLLRKQRTFDNGSIPHQIHLGELHAI
LRRQEDFYPFLKDNREKIEKILTFRIPYYVGPLARGNSRFAWMTRKSEETITPWNFEEVVDK
GASAQSFIERMTNFDKNLPNEKVLPKHSLLYEYFTVYNELTKVKYVTEGMRKPAFLSGEQKK
AIVDLLFKTNRKVTVKQLKEDYFKKIECFDSVEISGVEDRFNASLGTYHDLLKIIKDKDFLD
NEENEDILEDIVLTLTLFEDREMIEERLKTYAHLFDDKVMKQLKRRRYTGWGRLSRKLINGI
RDKQSGKTILDFLKSDGFANRNFMQLIHDDSLTFKEDIQKAQVSGQGDSLHEHIANLAGSPA
IKKGILQTVKVVDELVKVMGRHKPENIVIEMARENQTTQKGQKNSRERMKRIEEGIKELGSQ
ILKEHPVENTQLQNEKLYLYYLQNGRDMYVDQELDINRLSDYDVDHIVPQSFLKDDSIDNKV
LTRSDKNRGKSDNVPSEEVVKKMKNYWRQLLNAKLITQRKFDNLTKAERGGLSELDKAGFIK
RQLVETRQITKHVAQILDSRMNTKYDENDKLIREVKVITLKSKLVSDFRKDFQFYKVREINN
YHHAHDAYLNAVVGTALIKKYPKLESEFVYGDYKVYDVRKMIAKSEQEIGKATAKYFFYSNI
MNFFKTEITLANGEIRKRPLIETNGETGEIVWDKGRDFATVRKVLSMPQVNIVKKTEVQTGG
FSKESILPKRNSDKLIARKKDWDPKKYGGFVSPTVAYSVLVVAKVEKGKSKKLKSVKELLGI
TIMERSSFEKNPIDFLEAKGYKEVKKDLIIKLPKYSLFELENGRKRMLASARELQKGNELAL
PSKYVNFLYLASHYEKLKGSPEDNEQKQLFVEQHKHYLDEIIEQISEFSKRVILADANLDKV
LSAYNKHRDKPIREQAENIIHLFTLTNLGAPAAFKYFDTTIDRKQYRSTKEVLDATLIHQSI
TGLYETRIDLSQLGGDEGADKRTADGSEFESPKKKRKV
12. monoABE8.1_bpNLS + Y147T_Q154S
MSEVEFSHEYWMRHALTLAKRARDEREVPVGAVLVLNNRVIGEGWNRAIGLHDPTAHAEIMA
LRQGGLVMQNYRLIDATLYVTFEPCVMCAGAMIHSRIGRVVFGVRNAKTGAAGSLMDVLHYP
GMNHRVEITEGILADECAALLCTFFRMPRSVFNAQKKAQSSTDSGGSSGGSSGSETPGTSES
ATPESSGGSSGGSDKKYSIGLAIGTNSVGWAVITDEYKVPSKKFKVLGNTDRHSIKKNLIGA
LLFDSGETAEATRLKRTARRRYTRRKNRICYLQEIFSNEMAKVDDSFFHRLEESFLVEEDKK
HERHPIFGNIVDEVAYHEKYPTIYHLRKKLVDSTDKADLRLIYLALAHMIKFRGHFLIEGDL
NPDNSDVDKLFIQLVQTYNQLFEENPINASGVDAKAILSARLSKSRRLENLIAQLPGEKKNG
LFGNLIALSLGLTPNFKSNFDLAEDAKLQLSKDTYDDDLDNLLAQIGDQYADLFLAAKNLSD
AILLSDILRVNTEITKAPLSASMIKRYDEHHQDLTLLKALVRQQLPEKYKEIFFDQSKNGYA
GYIDGGASQEEFYKFIKPILEKMDGTEELLVKLNREDLLRKQRTFDNGSIPHQIHLGELHAI
LRRQEDFYPFLKDNREKIEKILTFRIPYYVGPLARGNSRFAWMTRKSEETITPWNFEEVVDK
GASAQSFIERMTNFDKNLPNEKVLPKHSLLYEYFTVYNELTKVKYVTEGMRKPAFLSGEQKK
AIVDLLFKTNRKVTVKQLKEDYFKKIECFDSVEISGVEDRFNASLGTYHDLLKIIKDKDFLD
NEENEDILEDIVLTLTLFEDREMIEERLKTYAHLFDDKVMKQLKRRRYTGWGRLSRKLINGI
RDKQSGKTILDFLKSDGFANRNFMQLIHDDSLTFKEDIQKAQVSGQGDSLHEHIANLAGSPA
IKKGILQTVKVVDELVKVMGRHKPENIVIEMARENQTTQKGQKNSRERMKRIEEGIKELGSQ
ILKEHPVENTQLQNEKLYLYYLQNGRDMYVDQELDINRLSDYDVDHIVPQSFLKDDSIDNKV
LTRSDKNRGKSDNVPSEEVVKKMKNYWRQLLNAKLITQRKFDNLTKAERGGLSELDKAGFIK
RQLVETRQITKHVAQILDSRMNTKYDENDKLIREVKVITLKSKLVSDFRKDFQFYKVREINN
YHHAHDAYLNAVVGTALIKKYPKLESEFVYGDYKVYDVRKMIAKSEQEIGKATAKYFFYSNI
MNFFKTEITLANGEIRKRPLIETNGETGEIVWDKGRDFATVRKVLSMPQVNIVKKTEVQTGG
FSKESILPKRNSDKLIARKKDWDPKKYGGFVSPTVAYSVLVVAKVEKGKSKKLKSVKELLGI
TIMERSSFEKNPIDFLEAKGYKEVKKDLIIKLPKYSLFELENGRKRMLASARELQKGNELAL
PSKYVNFLYLASHYEKLKGSPEDNEQKQLFVEQHKHYLDEIIEQISEFSKRVILADANLDKV
LSAYNKHRDKPIREQAENIIHLFTLTNLGAPAAFKYFDTTIDRKQYRSTKEVLDATLIHQSI
TGLYETRIDLSQLGGDEGADKRTADGSEFESPKKKRKV
13. monoABE8.1_bpNLS + H123Y123H_Y147R_Q154R_I76Y
MSEVEFSHEYWMRHALTLAKRARDEREVPVGAVLVLNNRVIGEGWNRAIGLHDPTAHAEIMA
LRQGGLVMQNYRLYDATLYVTFEPCVMCAGAMIHSRIGRVVFGVRNAKTGAAGSLMDVLHHP
GMNHRVEITEGILADECAALLCRFFRMPRRVFNAQKKAQSSTDSGGSSGGSSGSETPGTSES
ATPESSGGSSGGSDKKYSIGLAIGTNSVGWAVITDEYKVPSKKFKVLGNTDRHSIKKNLIGA
LLFDSGETAEATRLKRTARRRYTRRKNRICYLQEIFSNEMAKVDDSFFHRLEESFLVEEDKK
HERHPIFGNIVDEVAYHEKYPTIYHLRKKLVDSTDKADLRLIYLALAHMIKFRGHFLIEGDL
NPDNSDVDKLFIQLVQTYNQLFEENPINASGVDAKAILSARLSKSRRLENLIAQLPGEKKNG
LFGNLIALSLGLTPNFKSNFDLAEDAKLQLSKDTYDDDLDNLLAQIGDQYADLFLAAKNLSD
AILLSDILRVNTEITKAPLSASMIKRYDEHHQDLTLLKALVRQQLPEKYKEIFFDQSKNGYA
GYIDGGASQEEFYKFIKPILEKMDGTEELLVKLNREDLLRKQRTFDNGSIPHQIHLGELHAI
LRRQEDFYPFLKDNREKIEKILTFRIPYYVGPLARGNSRFAWMTRKSEETITPWNFEEVVDK
GASAQSFIERMTNFDKNLPNEKVLPKHSLLYEYFTVYNELTKVKYVTEGMRKPAFLSGEQKK
AIVDLLFKTNRKVTVKQLKEDYFKKIECFDSVEISGVEDRFNASLGTYHDLLKIIKDKDFLD
NEENEDILEDIVLTLTLFEDREMIEERLKTYAHLFDDKVMKQLKRRRYTGWGRLSRKLINGI
RDKQSGKTILDFLKSDGFANRNFMQLIHDDSLTFKEDIQKAQVSGQGDSLHEHIANLAGSPA
IKKGILQTVKVVDELVKVMGRHKPENIVIEMARENQTTQKGQKNSRERMKRIEEGIKELGSQ
ILKEHPVENTQLQNEKLYLYYLQNGRDMYVDQELDINRLSDYDVDHIVPQSFLKDDSIDNKV
LTRSDKNRGKSDNVPSEEVVKKMKNYWRQLLNAKLITQRKFDNLTKAERGGLSELDKAGFIK
RQLVETRQITKHVAQILDSRMNTKYDENDKLIREVKVITLKSKLVSDFRKDFQFYKVREINN
YHHAHDAYLNAVVGTALIKKYPKLESEFVYGDYKVYDVRKMIAKSEQEIGKATAKYFFYSNI
MNFFKTEITLANGEIRKRPLIETNGETGEIVWDKGRDFATVRKVLSMPQVNIVKKTEVQTGG
FSKESILPKRNSDKLIARKKDWDPKKYGGFVSPTVAYSVLVVAKVEKGKSKKLKSVKELLGI
TIMERSSFEKNPIDFLEAKGYKEVKKDLIIKLPKYSLFELENGRKRMLASARELQKGNELAL
PSKYVNFLYLASHYEKLKGSPEDNEQKQLFVEQHKHYLDEIIEQISEFSKRVILADANLDKV
LSAYNKHRDKPIREQAENIIHLFTLTNLGAPAAFKYFDTTIDRKQYRSTKEVLDATLIHQSI
TGLYETRIDLSQLGGDEGADKRTADGSEFESPKKKRKV
14. monoABE8.1_bpNLS + V82S + Q154R
MSEVEFSHEYWMRHALTLAKRARDEREVPVGAVLVLNNRVIGEGWNRAIGLHDPTAHAEIMA
LRQGGLVMQNYRLIDATLYSTFEPCVMCAGAMIHSRIGRVVFGVRNAKTGAAGSLMDVLHYP
GMNHRVEITEGILADECAALLCYFFRMPRRVFNAQKKAQSSTDSGGSSGGSSGSETPGTSES
ATPESSGGSSGGSDKKYSIGLAIGTNSVGWAVITDEYKVPSKKFKVLGNTDRHSIKKNLIGA
LLFDSGETAEATRLKRTARRRYTRRKNRICYLQEIFSNEMAKVDDSFFHRLEESFLVEEDKK
HERHPIFGNIVDEVAYHEKYPTIYHLRKKLVDSTDKADLRLIYLALAHMIKFRGHFLIEGDL
NPDNSDVDKLFIQLVQTYNQLFEENPINASGVDAKAILSARLSKSRRLENLIAQLPGEKKNG
LFGNLIALSLGLTPNFKSNFDLAEDAKLQLSKDTYDDDLDNLLAQIGDQYADLFLAAKNLSD
AILLSDILRVNTEITKAPLSASMIKRYDEHHQDLTLLKALVRQQLPEKYKEIFFDQSKNGYA
GYIDGGASQEEFYKFIKPILEKMDGTEELLVKLNREDLLRKQRTFDNGSIPHQIHLGELHAI
LRRQEDFYPFLKDNREKIEKILTFRIPYYVGPLARGNSRFAWMTRKSEETITPWNFEEVVDK
GASAQSFIERMTNFDKNLPNEKVLPKHSLLYEYFTVYNELTKVKYVTEGMRKPAFLSGEQKK
AIVDLLFKTNRKVTVKQLKEDYFKKIECFDSVEISGVEDRFNASLGTYHDLLKIIKDKDFLD
NEENEDILEDIVLTLTLFEDREMIEERLKTYAHLFDDKVMKQLKRRRYTGWGRLSRKLINGI
RDKQSGKTILDFLKSDGFANRNFMQLIHDDSLTFKEDIQKAQVSGQGDSLHEHIANLAGSPA
IKKGILQTVKVVDELVKVMGRHKPENIVIEMARENQTTQKGQKNSRERMKRIEEGIKELGSQ
ILKEHPVENTQLQNEKLYLYYLQNGRDMYVDQELDINRLSDYDVDHIVPQSFLKDDSIDNKV
LTRSDKNRGKSDNVPSEEVVKKMKNYWRQLLNAKLITQRKFDNLTKAERGGLSELDKAGFIK
RQLVETRQITKHVAQILDSRMNTKYDENDKLIREVKVITLKSKLVSDFRKDFQFYKVREINN
YHHAHDAYLNAVVGTALIKKYPKLESEFVYGDYKVYDVRKMIAKSEQEIGKATAKYFFYSNI
MNFFKTEITLANGEIRKRPLIETNGETGEIVWDKGRDFATVRKVLSMPQVNIVKKTEVQTGG
FSKESILPKRNSDKLIARKKDWDPKKYGGFVSPTVAYSVLVVAKVEKGKSKKLKSVKELLGI
TIMERSSFEKNPIDFLEAKGYKEVKKDLIIKLPKYSLFELENGRKRMLASARELQKGNELAL
PSKYVNFLYLASHYEKLKGSPEDNEQKQLFVEQHKHYLDEIIEQISEFSKRVILADANLDKV
LSAYNKHRDKPIREQAENIIHLFTLTNLGAPAAFKYFDTTIDRKQYRSTKEVLDATLIHQSI
TGLYETRIDLSQLGGDEGADKRTADGSEFESPKKKRKV

[0712] In some embodiments, the base editor is a cytidine base editor (CBE). In some embodiments, non-limiting exemplary CBE is BE1 (APOBECl-XTEN-dCas9), BE2 (APOBEC1-XTEN-dCas9-UGI), BE3 (APOBEC1-XTEN-dCas9(A840H)-UGI), BE3-Gam, saBE3, saBE4-Gam, BE4, BE4-Gam, saBE4, or saB4E-Gam. BE4 extends the APOBECl-Cas9n(D10A) linker to 32 amino acids and the Cas9n-UGI linker to 9 amino acids, and appends a second copy of UGI to the C-terminus of the construct with another 9-amino acid linker into a single base editor construct. The base editors saBE3 and saBE4 have the S. pyogenes Cas9n(D10A) replaced with the smaller S. aureus Cas9n(D10A). BE3-Gam, saBE3-Gam, BE4-Gam, and saBE4-Gam have 174 residues of Gam protein fused to the N-terminus of BE3, saBE3, BE4, and saBE4 via the 16 amino acid XTEN linker.

[0713] In some embodiments, the base editor is a fusion protein comprising a polynucleotide programmable nucleotide binding domain (e.g., Cas9-derived domain) fused to a nucleobase editing domain (e.g., all or a portion of a deaminase domain). In certain embodiments, the fusion proteins provided herein comprise one or more features that improve the base editing activity of the fusion proteins. For example, any of the fusion proteins provided herein may comprise a Cas9 domain that has reduced nuclease activity. In some embodiments, any of the fusion proteins provided herein may have a Cas9 domain that does not have nuclease activity (dCas9), or a Cas9 domain that cuts one strand of a duplexed DNA molecule, referred to as a Cas9 nickase (nCas9).

[0714] In some embodiments, the base editor further comprises a domain comprising all or a portion of a uracil glycosylase inhibitor (UGI). In some embodiments, the base editor comprises a domain comprising all or a portion of a uracil binding protein (UBP), such as a uracil DNA glycosylase (UDG). In some embodiments, the base editor comprises a domain comprising all or a portion of a nucleic acid polymerase. In some embodiments, a nucleic acid polymerase or portion thereof incorporated into a base editor is a translesion DNA polymerase.

[0715] In some embodiments, a domain of the base editor can comprise multiple domains. For example, the base editor comprising a polynucleotide programmable nucleotide binding domain derived from Cas9 can comprise an REC lobe and an NUC lobe corresponding to the REC lobe and NUC lobe of a wild-type or natural Cas9. In another example, the base editor can comprise one or more of a RuvCI domain, BH domain, REC1 domain, REC2 domain, RuvCII domain, L1 domain, HNH domain, L2 domain, RuvCII domain, WED domain, TOPO domain or CTD domain. In some embodiments, one or more domains of the base editor comprise a mutation (e.g., substitution, insertion, deletion) relative to a wild-type version of a polypeptide comprising the domain. For example, an HNH domain of a polynucleotide programmable DNA binding domain can comprise an H840A substitution. In another example, a RuvCI domain of a polynucleotide programmable DNA binding domain can comprise a D10A substitution.

[0716] Different domains (e.g., adjacent domains) of the base editor disclosed herein can be connected to each other with or without the use of one or more linker domains (e.g., an XTEN linker domain). In some embodiments, a linker domain can be a bond (e.g., covalent bond), chemical group, or a molecule linking two molecules or moieties, e.g., two domains of a fusion protein, such as, for example, a first domain (e.g., Cas9-derived domain) and a second domain (e.g., an adenosine deaminase domain). In some embodiments, a linker is a covalent bond (e.g., a carbon-carbon bond, disulfide bond, carbon-hetero atom bond, etc.). In certain embodiments, a linker is a carbon nitrogen bond of an amide linkage. In certain embodiments, a linker is a cyclic or acyclic, substituted or unsubstituted, branched or unbranched aliphatic or heteroaliphatic linker. In certain embodiments, a linker is polymeric (e.g., polyethylene, polyethylene glycol, polyamide, polyester, etc.). In certain embodiments, a linker comprises a monomer, dimer, or polymer of aminoalkanoic acid. In some embodiments, a linker comprises an aminoalkanoic acid (e.g., glycine, ethanoic acid, alanine, beta-alanine, 3-aminopropanoic acid, 4-aminobutanoic acid, 5-pentanoic acid, etc.). In some embodiments, a linker comprises a monomer, dimer, or polymer of aminohexanoic acid (Ahx). In certain embodiments, a linker is based on a carbocyclic moiety (e.g., cyclopentane, cyclohexane). In other embodiments, a linker comprises a polyethylene glycol moiety (PEG). In certain embodiments, a linker comprises an aryl or heteroaryl moiety. In certain embodiments, the linker is based on a phenyl ring. A linker can include functionalized moieties to facilitate attachment of a nucleophile (e.g., thiol, amino) from the peptide to the linker. Any electrophile can be used as part of the linker. Exemplary electrophiles include, but are not limited to, activated esters, activated amides, Michael acceptors, alkyl halides, aryl halides, acyl halides, and isothiocyanates. In some embodiments, a linker joins a gRNA binding domain of an RNA-programmable nuclease, including a Cas9 nuclease domain, and the catalytic domain of a nucleic acid editing protein. In some embodiments, a linker joins a dCas9 and a second domain (e.g., UGI, etc.).

[0717] Typically, a linker is positioned between, or flanked by, two groups, molecules, or other moieties and connected to each one via a covalent bond, thus connecting the two. In some embodiments, a linker is an amino acid or a plurality of amino acids (e.g., a peptide or protein). In some embodiments, a linker is an organic molecule, group, polymer, or chemical moiety. In some embodiments, a linker is 2-100 amino acids in length, for example, 2, 3, 4, 5, 6, 7, 8, 9, 10, 11, 12, 13, 14, 15, 16, 17, 18, 19, 20, 21, 22, 23, 24, 25, 26, 27, 28, 29, 30, 30-35, 35-40, 40-45, 45-50, 50-60, 60-70, 70-80, 80-90, 90-100, 100-150, or 150-200 amino acids in length. In some embodiments, the linker is about 3 to about 104 (e.g., 5, 6, 7, 8, 9, 10, 11, 12, 13, 14, 15, 16, 17, 18, 19, 20, 21, 22, 23, 24, 25, 26, 27, 28, 29, 30, 31, 32, 33, 34, 35, 36, 37, 38, 39, 40, 41, 42, 43, 44, 45, 46, 47, 48, 49, 50, 55, 60, 65, 70, 75, 80, 85, 90, 95, or 100) amino acids in length. Longer or shorter linkers are also contemplated. In some embodiments, a linker domain comprises the amino acid sequence SGSETPGTSESATPES, which can also be referred to as the XTEN linker. Any method for linking the fusion protein domains can be employed (e.g., ranging from very flexible linkers of the form (SGGS)n, (GGGS)n, (GGGGS)n, and (G)n, to more rigid linkers of the form (EAAAK)n, (GGS)n, SGSETPGTSESATPES (see, e.g., Guilinger J P, Thompson D B, Liu D R. Fusion of catalytically inactive Cas9 to FokI nuclease improves the specificity of genome modification. Nat. Biotechnol. 2014; 32(6): 577-82; the entire contents are incorporated herein by reference), or (XP)ₙ motif, in order to achieve the optimal length for activity for the nucleobase editor. In some embodiments, n is 1, 2, 3, 4, 5, 6, 7, 8, 9, 10, 11, 12, 13, 14, or 15. In some embodiments, the linker comprises a (GGS)ₙ motif, wherein n is 1, 3, or 7. In some embodiments, the Cas9 domain of the fusion proteins provided herein are fused via a linker comprising the amino acid sequence SGSETPGTSESATPES. In some embodiments, a linker comprises a plurality of proline residues and is 5-21, 5-14, 5-9, 5-7 amino acids in length, e.g., PAPAP, PAPAPA, PAPAPAP, PAPAPAPA, P(AP)₄, P(AP)₇, P(AP)₁₀ (see, e.g., Tan J, Zhang F, Karcher D, Bock R. Engineering of high-precision base editors for site-specific single nucleotide replacement. Nat Commun. 2019 Jan. 25; 10(1):439; the entire contents are incorporated herein by reference). Such proline-rich linkers are also termed “rigid” linkers.

[0718] A fusion protein of the invention comprises a nucleic acid editing domain. In some embodiments, the deaminase is an adenosine deaminase. In some embodiments, the deaminase is a vertebrate deaminase. In some embodiments, the deaminase is an invertebrate deaminase. In some embodiments, the deaminase is a human, chimpanzee, gorilla, monkey, cow, dog, rat, or mouse deaminase. In some embodiments, the deaminase is a human deaminase. In some embodiments, the deaminase is a rat deaminase.

[0719] As used herein, “heterodimer” can refer to a fusion protein comprising a wild type TadA domain and a variant of TadA*7.10 domain or to two variant TadA domains (e.g., TadA7.10 and TadA7.10 with Y147T and Q154S alterations.

[0720] The heterologous polypeptide (e.g., deaminase) can be inserted in the napDNAbp (e.g., Cas9) at a suitable location, for example, such that the napDNAbp retains its ability to bind the target polynucleotide and a guide nucleic acid. A deaminase can be inserted into a napDNAbp without compromising function of the deaminase (e.g., base editing activity) or the napDNAbp (e.g., ability to bind to target nucleic acid and guide nucleic acid). A deaminase can be inserted in the napDNAbp at, for example, a disordered region or a region comprising a high temperature factor or B-factor as shown by crystallographic studies. Regions of a protein that are less ordered, disordered, or unstructured, for example solvent exposed regions and loops, can be used for insertion without compromising structure or function. A deaminase can be inserted in the napDNAbp in a flexible loop region or a solvent-exposed region. In some embodiments, the deaminase is inserted in a flexible loop of the Cas9 polypeptide.

[0721] In some embodiments, the insertion location of a deaminase is determined by B-factor analysis of the crystal structure of Cas9 polypeptide. In some embodiments, the deaminase is inserted in regions of the Cas9 polypeptide comprising higher than average B-factors (e.g., higher B factors compared to the total protein or the protein domain comprising the disordered region). B-factor or temperature factor can indicate the fluctuation of atoms from their average position (for example, as a result of temperature-dependent atomic vibrations or static disorder in a crystal lattice). A high B-factor (e.g., higher than average B-factor) for backbone atoms can be indicative of a region with relatively high local mobility. Such a region can be used for inserting a deaminase without compromising structure or function. A deaminase can be inserted at a location with a residue having a Ca atom with a B-factor that is 50%, 60%, 70%, 80%, 90%, 100%, 110%, 120%, 130%, 140%, 150%, 160%, 170%, 180%, 190%, 200%, or greater than 200% more than the average B-factor for the total protein. A deaminase can be inserted at a location with a residue having a Ca atom with a B-factor that is 50%, 60%, 70%, 80%, 90%, 100%, 110%, 120%, 130%, 140%, 150%, 160%, 170%, 180%, 190%, 200% or greater than 200% more than the average B-factor for a Cas9 protein domain comprising the residue. Cas9 polypeptide positions comprising a higher than average B-factor can include, for example, residues 768, 792, 1052, 1015, 1022, 1026, 1029, 1067, 1040, 1054, 1068, 1246, 1247, and 1248 as numbered in SEQ ID No:1. Cas9 polypeptide regions comprising a higher than average B-factor can include, for example, residues 792-872, 792-906, and 2-791 as numbered in SEQ ID No:1.

[0722] A heterologous polypeptide (e.g., deaminase) can be inserted in the napDNAbp at an amino acid residue selected from the group consisting of: 768, 791, 792, 1015, 1016, 1022, 1023, 1026, 1029, 1040, 1052, 1054, 1067, 1068, 1069, 1246, 1247, and 1248 as numbered in SEQ ID NO: 1, or a corresponding amino acid residue in another Cas9 polypeptide. In some embodiments, the heterologous polypeptide is inserted between amino acid positions 768-769, 791-792, 792-793, 1015-1016, 1022-1023, 1026-1027, 1029-1030, 1040-1041, 1052-1053, 1054-1055, 1067-1068, 1068-1069, 1247-1248, or 1248-1249 as numbered in SEQ ID NO: 1 or corresponding amino acid positions thereof. In some embodiments, the heterologous polypeptide is inserted between amino acid positions 769-770, 792-793, 793-794, 1016-1017, 1023-1024, 1027-1028, 1030-1031, 1041-1042, 1053-1054, 1055-1056, 1068-1069, 1069-1070, 1248-1249, or 1249-1250 as numbered in SEQ ID NO: 1 or corresponding amino acid positions thereof. In some embodiments, the heterologous polypeptide replaces an amino acid residue selected from the group consisting of: 768, 791, 792, 1015, 1016, 1022, 1023, 1026, 1029, 1040, 1052, 1054, 1067, 1068, 1069, 1246, 1247, and 1248 as numbered in SEQ ID NO: 1, or a corresponding amino acid residue in another Cas9 polypeptide. It should be understood that the reference to SEQ ID NO:1 with respect to insertion positions is for illustrative purpose. The insertions as discussed herein are not limited to the Cas9 polypeptide sequence of SEQ ID NO: 1, but include insertion at corresponding locations in variant Cas9 polypeptides, for example a Cas9 nickase (nCas9), nuclease dead Cas9 (dCas9), a Cas9 variant lacking a nuclease domain, a truncated Cas9, or a Cas9 domain lacking partial or complete HNH domain.

[0723] A heterologous polypeptide (e.g., deaminase) can be inserted in the napDNAbp at an amino acid residue selected from the group consisting of: 768, 792, 1022, 1026, 1040, 1068, and 1247 as numbered in SEQ ID NO: 1, or a corresponding amino acid residue in another Cas9 polypeptide. In some embodiments, the heterologous polypeptide is inserted between amino acid positions 768-769, 792-793, 1022-1023, 1026-1027, 1029-1030, 1040-1041, 1068-1069, or 1247-1248 as numbered in SEQ ID NO: 1 or corresponding amino acid positions thereof. In some embodiments, the heterologous polypeptide is inserted between amino acid positions 769-770, 793-794, 1023-1024, 1027-1028, 1030-1031, 1041-1042, 1069-1070, or 1248-1249 as numbered in SEQ ID NO: 1 or corresponding amino acid positions thereof. In some embodiments, the heterologous polypeptide replaces an amino acid residue selected from the group consisting of: 768, 792, 1022, 1026, 1040, 1068, and 1247 as numbered in SEQ ID NO: 1, or a corresponding amino acid residue in another Cas9 polypeptide.

[0724] In some embodiments, an ABE (e.g., TadA) is inserted at an amino acid residue selected from the group consisting of: 1015, 1022, 1029, 1040, 1068, 1247, 1054, 1026, 768, 1067, 1248, 1052, and 1246 as numbered in SEQ ID NO: 1, or a corresponding amino acid residue in another Cas9 polypeptide. In some embodiments, an ABE (e.g., TadA) is inserted in place of residues 792-872, 792-906, or 2-791 as numbered in SEQ ID NO: 1, or a corresponding amino acid residue in another Cas9 polypeptide. In some embodiments, the ABE is inserted at the N-terminus of an amino acid selected from the group consisting of: 1015, 1022, 1029, 1040, 1068, 1247, 1054, 1026, 768, 1067, 1248, 1052, and 1246 as numbered in SEQ ID NO: 1, or a corresponding amino acid residue in another Cas9 polypeptide. In some embodiments, the ABE is inserted at the C-terminus of an amino acid selected from the group consisting of: 1015, 1022, 1029, 1040, 1068, 1247, 1054, 1026, 768, 1067, 1248, 1052, and 1246 as numbered in SEQ ID NO: 1, or a corresponding amino acid residue in another Cas9 polypeptide. In some embodiments, the ABE is inserted to replace an amino acid selected from the group consisting of: 1015, 1022, 1029, 1040, 1068, 1247, 1054, 1026, 768, 1067, 1248, 1052, and 1246 as numbered in SEQ ID NO: 1, or a corresponding amino acid residue in another Cas9 polypeptide.

[0725] In some embodiments, a CBE (e.g., APOBEC1) is inserted at an amino acid residue selected from the group consisting of: 1016, 1023, 1029, 1040, 1069, and 1247 as numbered in SEQ ID NO: 1, or a corresponding amino acid residue in another Cas9 polypeptide. In some embodiments, the ABE is inserted at the N-terminus of an amino acid selected from the group consisting of: 1016, 1023, 1029, 1040, 1069, and 1247 as numbered in SEQ ID NO: 1, or a corresponding amino acid residue in another Cas9 polypeptide. In some embodiments, the ABE is inserted at the C-terminus of an amino acid selected from the group consisting of: 1016, 1023, 1029, 1040, 1069, and 1247 as numbered in SEQ ID NO: 1, or a corresponding amino acid residue in another Cas9 polypeptide. In some embodiments, the ABE is inserted to replace an amino acid selected from the group consisting of: 1016, 1023, 1029, 1040, 1069, and 1247 as numbered in SEQ ID NO: 1, or a corresponding amino acid residue in another Cas9 polypeptide.

[0726] In some embodiments, the deaminase is inserted at amino acid residue 768 as numbered in SEQ ID NO: 1, or a corresponding amino acid residue in another Cas9 polypeptide. In some embodiments, the ABE is inserted at the N-terminus of amino acid 768 as numbered in SEQ ID NO: 1, or a corresponding amino acid residue in another Cas9 polypeptide. In some embodiments, the ABE is inserted at the C-terminus of amino acid 768 as numbered in SEQ ID NO: 1, or a corresponding amino acid residue in another Cas9 polypeptide. In some embodiments, the ABE is inserted to replace amino acid 768 as numbered in SEQ ID NO: 1, or a corresponding amino acid residue in another Cas9 polypeptide.

[0727] In some embodiments, the deaminase is inserted at amino acid residue 791 as numbered in SEQ ID NO: 1, or a corresponding amino acid residue in another Cas9 polypeptide. In some embodiments, the ABE is inserted at the N-terminus of amino acid 791 as numbered in SEQ ID NO: 1, or a corresponding amino acid residue in another Cas9 polypeptide. In some embodiments, the ABE is inserted at the C-terminus of amino acid 791 as numbered in SEQ ID NO: 1, or a corresponding amino acid residue in another Cas9 polypeptide. In some embodiments, the ABE is inserted to replace amino acid 791 as numbered in SEQ ID NO: 1, or a corresponding amino acid residue in another Cas9 polypeptide.

[0728] In some embodiments, the deaminase is inserted at amino acid residue 792 as numbered in SEQ ID NO: 1, or a corresponding amino acid residue in another Cas9 polypeptide. In some embodiments, the ABE is inserted at the N-terminus of amino acid 792 as numbered in SEQ ID NO: 1, or a corresponding amino acid residue in another Cas9 polypeptide. In some embodiments, the ABE is inserted at the C-terminus of amino acid 792 as numbered in SEQ ID NO: 1, or a corresponding amino acid residue in another Cas9 polypeptide. In some embodiments, the ABE is inserted to replace amino acid 792 as numbered in SEQ ID NO: 1, or a corresponding amino acid residue in another Cas9 polypeptide.

[0729] In some embodiments, the deaminase is inserted at amino acid residue 1016 as numbered in SEQ ID NO: 1, or a corresponding amino acid residue in another Cas9 polypeptide. In some embodiments, the ABE is inserted at the N-terminus of amino acid 1016 as numbered in SEQ ID NO: 1, or a corresponding amino acid residue in another Cas9 polypeptide. In some embodiments, the ABE is inserted at the C-terminus of amino acid 1016 as numbered in SEQ ID NO: 1, or a corresponding amino acid residue in another Cas9 polypeptide. In some embodiments, the ABE is inserted to replace amino acid 1016 as numbered in SEQ ID NO: 1, or a corresponding amino acid residue in another Cas9 polypeptide.

[0730] In some embodiments, the deaminase is inserted at amino acid residue 1022 as numbered in SEQ ID NO: 1, or a corresponding amino acid residue in another Cas9 polypeptide. In some embodiments, the ABE is inserted at the N-terminus of amino acid 1022 as numbered in SEQ ID NO: 1, or a corresponding amino acid residue in another Cas9 polypeptide. In some embodiments, the ABE is inserted at the C-terminus of amino acid 1022 as numbered in SEQ ID NO: 1, or a corresponding amino acid residue in another Cas9 polypeptide. In some embodiments, the ABE is inserted to replace amino acid 1022 as numbered in SEQ ID NO: 1, or a corresponding amino acid residue in another Cas9 polypeptide.

[0731] In some embodiments, the deaminase is inserted at amino acid residue 1023 as numbered in SEQ ID NO: 1, or a corresponding amino acid residue in another Cas9 polypeptide. In some embodiments, the ABE is inserted at the N-terminus of amino acid 1023 as numbered in SEQ ID NO: 1, or a corresponding amino acid residue in another Cas9 polypeptide. In some embodiments, the ABE is inserted at the C-terminus of amino acid 1023 as numbered in SEQ ID NO: 1, or a corresponding amino acid residue in another Cas9 polypeptide. In some embodiments, the ABE is inserted to replace amino acid 1023 as numbered in SEQ ID NO: 1, or a corresponding amino acid residue in another Cas9 polypeptide.

[0732] In some embodiments, the deaminase is inserted at amino acid residue 1026 as numbered in SEQ ID NO: 1, or a corresponding amino acid residue in another Cas9 polypeptide. In some embodiments, the ABE is inserted at the N-terminus of amino acid 1026 as numbered in SEQ ID NO: 1, or a corresponding amino acid residue in another Cas9 polypeptide. In some embodiments, the ABE is inserted at the C-terminus of amino acid 1026 as numbered in SEQ ID NO: 1, or a corresponding amino acid residue in another Cas9 polypeptide. In some embodiments, the ABE is inserted to replace amino acid 1026 as numbered in SEQ ID NO: 1, or a corresponding amino acid residue in another Cas9 polypeptide.

[0733] In some embodiments, the deaminase is inserted at amino acid residue 1029 as numbered in SEQ ID NO: 1, or a corresponding amino acid residue in another Cas9 polypeptide. In some embodiments, the ABE is inserted at the N-terminus of amino acid 1029 as numbered in SEQ ID NO: 1, or a corresponding amino acid residue in another Cas9 polypeptide. In some embodiments, the ABE is inserted at the C-terminus of amino acid 1029 as numbered in SEQ ID NO: 1, or a corresponding amino acid residue in another Cas9 polypeptide. In some embodiments, the ABE is inserted to replace amino acid 1029 as numbered in SEQ ID NO: 1, or a corresponding amino acid residue in another Cas9 polypeptide.

[0734] In some embodiments, the deaminase is inserted at amino acid residue 1040 as numbered in SEQ ID NO: 1, or a corresponding amino acid residue in another Cas9 polypeptide. In some embodiments, the ABE is inserted at the N-terminus of amino acid 140 as numbered in SEQ ID NO: 1, or a corresponding amino acid residue in another Cas9 polypeptide. In some embodiments, the ABE is inserted at the C-terminus of amino acid 1040 as numbered in SEQ ID NO: 1, or a corresponding amino acid residue in another Cas9 polypeptide. In some embodiments, the ABE is inserted to replace amino acid 1040 as numbered in SEQ ID NO: 1, or a corresponding amino acid residue in another Cas9 polypeptide.

[0735] In some embodiments, the deaminase is inserted at amino acid residue 1052 as numbered in SEQ ID NO: 1, or a corresponding amino acid residue in another Cas9 polypeptide. In some embodiments, the ABE is inserted at the N-terminus of amino acid 1052 as numbered in SEQ ID NO: 1, or a corresponding amino acid residue in another Cas9 polypeptide. In some embodiments, the ABE is inserted at the C-terminus of amino acid 1052 as numbered in SEQ ID NO: 1, or a corresponding amino acid residue in another Cas9 polypeptide. In some embodiments, the ABE is inserted to replace amino acid 1052 as numbered in SEQ ID NO: 1, or a corresponding amino acid residue in another Cas9 polypeptide.

[0736] In some embodiments, the deaminase is inserted at amino acid residue 1054 as numbered in SEQ ID NO: 1, or a corresponding amino acid residue in another Cas9 polypeptide. In some embodiments, the ABE is inserted at the N-terminus of amino acid 1054 as numbered in SEQ ID NO: 1, or a corresponding amino acid residue in another Cas9 polypeptide. In some embodiments, the ABE is inserted at the C-terminus of amino acid 1054 as numbered in SEQ ID NO: 1, or a corresponding amino acid residue in another Cas9 polypeptide. In some embodiments, the ABE is inserted to replace amino acid 1054 as numbered in SEQ ID NO: 1, or a corresponding amino acid residue in another Cas9 polypeptide.

[0737] In some embodiments, the deaminase is inserted at amino acid residue 1067 as numbered in SEQ ID NO: 1, or a corresponding amino acid residue in another Cas9 polypeptide. In some embodiments, the ABE is inserted at the N-terminus of amino acid 1067 as numbered in SEQ ID NO: 1, or a corresponding amino acid residue in another Cas9 polypeptide. In some embodiments, the ABE is inserted at the C-terminus of amino acid 1067 as numbered in SEQ ID NO: 1, or a corresponding amino acid residue in another Cas9 polypeptide. In some embodiments, the ABE is inserted to replace amino acid 1067 as numbered in SEQ ID NO: 1, or a corresponding amino acid residue in another Cas9 polypeptide.

[0738] In some embodiments, the deaminase is inserted at amino acid residue 1068 as numbered in SEQ ID NO: 1, or a corresponding amino acid residue in another Cas9 polypeptide. In some embodiments, the ABE is inserted at the N-terminus of amino acid 1068 as numbered in SEQ ID NO: 1, or a corresponding amino acid residue in another Cas9 polypeptide. In some embodiments, the ABE is inserted at the C-terminus of amino acid 1068 as numbered in SEQ ID NO: 1, or a corresponding amino acid residue in another Cas9 polypeptide. In some embodiments, the ABE is inserted to replace amino acid 1068 as numbered in SEQ ID NO: 1, or a corresponding amino acid residue in another Cas9 polypeptide.

[0739] In some embodiments, the deaminase is inserted at amino acid residue 1069 as numbered in SEQ ID NO: 1, or a corresponding amino acid residue in another Cas9 polypeptide. In some embodiments, the ABE is inserted at the N-terminus of amino acid 1069 as numbered in SEQ ID NO: 1, or a corresponding amino acid residue in another Cas9 polypeptide. In some embodiments, the ABE is inserted at the C-terminus of amino acid 1069 as numbered in SEQ ID NO: 1, or a corresponding amino acid residue in another Cas9 polypeptide. In some embodiments, the ABE is inserted to replace amino acid 1069 as numbered in SEQ ID NO: 1, or a corresponding amino acid residue in another Cas9 polypeptide.

[0740] In some embodiments, the deaminase is inserted at amino acid residue 1246 as numbered in SEQ ID NO: 1, or a corresponding amino acid residue in another Cas9 polypeptide. In some embodiments, the ABE is inserted at the N-terminus of amino acid 1246 as numbered in SEQ ID NO: 1, or a corresponding amino acid residue in another Cas9 polypeptide. In some embodiments, the ABE is inserted at the C-terminus of amino acid 1246 as numbered in SEQ ID NO: 1, or a corresponding amino acid residue in another Cas9 polypeptide. In some embodiments, the ABE is inserted to replace amino acid 1246 as numbered in SEQ ID NO: 1, or a corresponding amino acid residue in another Cas9 polypeptide.

[0741] In some embodiments, the deaminase is inserted at amino acid residue 1247 as numbered in SEQ ID NO: 1, or a corresponding amino acid residue in another Cas9 polypeptide. In some embodiments, the ABE is inserted at the N-terminus of amino acid 1247 as numbered in SEQ ID NO: 1, or a corresponding amino acid residue in another Cas9 polypeptide. In some embodiments, the ABE is inserted at the C-terminus of amino acid 1247 as numbered in SEQ ID NO: 1, or a corresponding amino acid residue in another Cas9 polypeptide. In some embodiments, the ABE is inserted to replace amino acid 1247 as numbered in SEQ ID NO: 1, or a corresponding amino acid residue in another Cas9 polypeptide.

[0742] In some embodiments, the deaminase is inserted at amino acid residue 1248 as numbered in SEQ ID NO: 1, or a corresponding amino acid residue in another Cas9 polypeptide. In some embodiments, the ABE is inserted at the N-terminus of amino acid 1248 as numbered in SEQ ID NO: 1, or a corresponding amino acid residue in another Cas9 polypeptide. In some embodiments, the ABE is inserted at the C-terminus of amino acid 1248 as numbered in SEQ ID NO: 1, or a corresponding amino acid residue in another Cas9 polypeptide. In some embodiments, the ABE is inserted to replace amino acid 1248 as numbered in SEQ ID NO: 1, or a corresponding amino acid residue in another Cas9 polypeptide.

[0743] In some embodiments, a heterologous polypeptide (e.g., deaminase) is inserted in a flexible loop of a Cas9 polypeptide. The flexible loop portions can be selected from the group consisting of 530-537, 569-570, 686-691, 943-947, 1002-1025, 1052-1077, 1232-1247, or 1298-1300 as numbered in SEQ ID NO: 1, or a corresponding amino acid residue in another Cas9 polypeptide. The flexible loop portions can be selected from the group consisting of: 1-529, 538-568, 580-685, 692-942, 948-1001, 1026-1051, 1078-1231, or 1248-1297 as numbered in SEQ ID NO: 1, or a corresponding amino acid residue in another Cas9 polypeptide.

[0744] A heterologous polypeptide (e.g., deaminase) can be inserted into a Cas9 polypeptide region corresponding to amino acid residues: 1017-1069, 1242-1247, 1052-1056, 1060-1077, 1002-1003, 943-947, 530-537, 568-579, 686-691,1242-1247, 1298-1300, 1066-1077, 1052-1056, or 1060-1077 as numbered in SEQ ID NO: 1, or a corresponding amino acid residue in another Cas9 polypeptide.

[0745] A heterologous polypeptide (e.g., deaminase) can be inserted in place of a deleted region of a Cas9 polypeptide. The deleted region can correspond to an N-terminal or C-terminal portion of the Cas9 polypeptide. In some embodiments, the deleted region corresponds to residues 792-872 as numbered in SEQ ID NO: 1, or a corresponding amino acid residue in another Cas9 polypeptide. In some embodiments, the deleted region corresponds to residues 792-906 as numbered in SEQ ID NO: 1, or a corresponding amino acid residue in another Cas9 polypeptide. In some embodiments, the deleted region corresponds to residues 2-791 as numbered in SEQ ID NO: 1, or a corresponding amino acid residue in another Cas9 polypeptide.

[0746] A heterologous polypeptide (e.g., deaminase) can be inserted within a structural or functional domain of a Cas9 polypeptide. A heterologous polypeptide (e.g., deaminase) can be inserted between two structural or functional domains of a Cas9 polypeptide. A heterologous polypeptide (e.g., deaminase) can be inserted in place of a structural or functional domain of a Cas9 polypeptide, for example, after deleting the domain from the Cas9 polypeptide. The structural or functional domains of a Cas9 polypeptide can include, for example, RuvC I, RuvC IL, RuvC III, Rec1, Rec2, PI, or HNH.

[0747] In some embodiments, the Cas9 polypeptide lacks one or more domains selected from the group consisting of: RuvC I, RuvC II, RuvC III, Rec1, Rec2, PI, or HNH domain. In some embodiments, the Cas9 polypeptide lacks a nuclease domain. In some embodiments, the Cas9 polypeptide lacks a HNH domain. In some embodiments, the Cas9 polypeptide lacks a portion of the HNH domain such that the Cas9 polypeptide has reduced or abolished HNH activity.

[0748] In some embodiments, the Cas9 polypeptide comprises a deletion of the nuclease domain and the deaminase is inserted to replace the nuclease domain. In some embodiments, the HNH domain is deleted and the deaminase is inserted in its place. In some embodiments, one or more of the RuvC domains is deleted and the deaminase is inserted in its place.

[0749] A fusion protein comprising a heterologous polypeptide can be flanked by a N-terminal and a C-terminal fragment of a napDNAbp. In some embodiments, the fusion protein comprises a deaminase flanked by a N-terminal fragment and a C-terminal fragment of a Cas9 polypeptide. The N terminal fragment or the C terminal fragment can bind the target polynucleotide sequence. The C-terminus of the N terminal fragment or the N-terminus of the C terminal fragment can comprise a part of a flexible loop of a Cas9 polypeptide. The C-terminus of the N terminal fragment or the N-terminus of the C terminal fragment can comprise a part of an alpha-helix structure of the Cas9 polypeptide. The N-terminal fragment or the C-terminal fragment can comprise a DNA binding domain. The N-terminal fragment or the C-terminal fragment can comprise a RuvC domain. The N-terminal fragment or the C-terminal fragment can comprise a HNH domain. In some embodiments, neither of the N-terminal fragment and the C-terminal fragment comprises a HNH domain.

[0750] In some embodiments, the C-terminus of the N terminal Cas9 fragment comprises an amino acid that is in proximity to a target nucleobase when the fusion protein deaminates the target nucleobase. In some embodiments, the N-terminus of the C terminal Cas9 fragment comprises an amino acid that is in proximity to a target nucleobase when the fusion protein deaminates the target nucleobase. The insertion location of different deaminases can be different in order to have proximity between the target nucleobase and an amino acid in the C-terminus of the N terminal Cas9 fragment or the N-terminus of the C terminal Cas9 fragment. For example, the insertion position of an ABE can be at an amino acid residue selected from the group consisting of: 1015, 1022, 1029, 1040, 1068, 1247, 1054, 1026, 768, 1067, 1248, 1052, and 1246 as numbered in SEQ ID NO: 1, or a corresponding amino acid residue in another Cas9 polypeptide. A suitable insertion position of a CBE can be an amino acid residue selected from the group consisting of: 1016, 1023, 1029, 1040, 1069, and 1247 as numbered in SEQ ID NO: 1, or a corresponding amino acid residue in another Cas9 polypeptide. In certain embodiments, the insertion of the ABE can be inserted to the N terminus or the C terminus of any one of the above listed amino acid residues. In some embodiments, the insertion of the ABE can be inserted to replace any one of the above listed amino acid residues.

[0751] The N-terminal Cas9 fragment of a fusion protein (i.e., the N-terminal Cas9 fragment flanking the deaminase in a fusion protein) can comprise the N-terminus of a Cas9 polypeptide. The N-terminal Cas9 fragment of a fusion protein can comprise a length of at least about: 100, 200, 300, 400, 500, 600, 700, 800, 900, 1000, 1100, 1200, or 1300 amino acids. The N-terminal Cas9 fragment of a fusion protein can comprise a sequence corresponding to amino acid residues: 1-56, 1-95, 1-200, 1-300, 1-400, 1-500, 1-600, 1-700, 1-718, 1-765, 1-780, 1-906, 1-918, or 1-1100 as numbered in SEQ ID NO: 1, or a corresponding amino acid residue in another Cas9 polypeptide. The N-terminal Cas9 fragment can comprise a sequence comprising at least: 85%, at least 90%, at least 91%, at least 92%, at least 93%, at least 94%, at least 95%, at least 96%, at least 97%, at least 98%, at least 99%, or at least 99.5% sequence identity to amino acid residues: 1-56, 1-95, 1-200, 1-300, 1-400, 1-500, 1-600, 1-700, 1-718, 1-765, 1-780, 1-906, 1-918, or 1-1100 as numbered in SEQ ID NO: 1, or a corresponding amino acid residue in another Cas9 polypeptide.

[0752] The C-terminal Cas9 fragment of a fusion protein (i.e., the C-terminal Cas9 fragment flanking the deaminase in a fusion protein) can comprise the C-terminus of a Cas9 polypeptide. The C-terminal Cas9 fragment of a fusion protein can comprise a length of at least about: 100, 200, 300, 400, 500, 600, 700, 800, 900, 1000, 1100, 1200, or 1300 amino acids. The C-terminal Cas9 fragment of a fusion protein can comprise a sequence corresponding to amino acid residues: 1099-1368, 918-1368, 906-1368, 780-1368, 765-1368, 718-1368, 94-1368, or 56-1368 as numbered in SEQ ID NO: 1, or a corresponding amino acid residue in another Cas9 polypeptide. The N-terminal Cas9 fragment can comprise a sequence comprising at least: 85%, at least 90%, at least 91%, at least 92%, at least 93%, at least 94%, at least 95%, at least 96%, at least 97%, at least 98%, at least 99%, or at least 99.5% sequence identity to amino acid residues: 1099-1368, 918-1368, 906-1368, 780-1368, 765-1368, 718-1368, 94-1368, or 56-1368 as numbered in SEQ ID NO: 1, or a corresponding amino acid residue in another Cas9 polypeptide.

[0753] The N-terminal Cas9 fragment and C-terminal Cas9 fragment of a fusion protein taken together may not correspond to a full-length naturally occurring Cas9 polypeptide sequence, for example, as set forth in SEQ ID NO: 1.

[0754] The fusion protein described herein can effect targeted deamination with reduced deamination at non-target sites (e.g., off-target sites), such as reduced genome wide spurious deamination. The fusion protein described herein can effect targeted deamination with reduced bystander deamination at non-target sites. The undesired deamination or off-target deamination can be reduced by at least 30%, at least 40%, at least 50%, at least 60%, at least 70%, at least 80%, at least 90%, at least 95%, or at least 99% compared with, for example, an end terminus fusion protein comprising the deaminase fused to a N terminus or a C terminus of a Cas9 polypeptide. The undesired deamination or off-target deamination can be reduced by at least one-fold, at least two-fold, at least three-fold, at least four-fold, at least five-fold, at least tenfold, at least fifteen fold, at least twenty fold, at least thirty fold, at least forty fold, at least fifty fold, at least 60 fold, at least 70 fold, at least 80 fold, at least 90 fold, or at least hundred fold, compared with, for example, an end terminus fusion protein comprising the deaminase fused to a N terminus or a C terminus of a Cas9 polypeptide.

[0755] In some embodiments, the deaminase of the fusion protein deaminates no more than two nucleobases within the range of a R-loop. In some embodiments, the deaminase of the fusion protein deaminates no more than three nucleobases within the range of the R-loop. In some embodiments, the deaminase of the fusion protein deaminates no more than 2, 3, 4, 5, 6, 7, 8, 9, or 10 nucleobases within the range of the R-loop. A R-loop is a three-stranded nucleic acid structure including a DNA:RNA hybrid, a DNA:DNA or a RNA: RNA complementary structure and the associated with single-stranded DNA. As used herein, a R-loop may be formed when a a target polynucleotide is contacted with a CRISPR complex or a base editing complex, wherein a portion of a guide polynucleotide, e.g. a guide RNA, hybridizes with and displaces with a portion of a target polynucleotide, e.g. a target DNA. In some embodiments, a R-loop comprises a hybridized region of a spacer sequence and a target DNA complementary sequence. A R-loop region may be of about 5, 6, 7, 8, 9, 10, 11, 12, 13, 14, 15, 16, 17, 18, 19, 20, 21, 22, 23, 24, 25, 26, 27, 28, 29, 30, 31, 32, 33, 34, 35, 36, 37, 38, 39, 40, 41, 42, 43, 44, 45, 46, 47, 48, 49, or 50 nuclebase pairs in length. In some embodiments, the R-loop region is about 20 nucleobase pairs in length. It should be understood that, as used herein, a R-loop region is not limited to the target DNA strand that hybridizes with the gudie polynucleotide. For example, editing of a target nucleobase within a R-loop region may be to a DNA strand that comprises the complementary strand to a guide RNA or may be to a DNA strand that is the opposing strand of the strand complementary to the guide RNA. In some embodiments, editing in the region of the R-loop comprises editing a nucleobase on non-complementary strand (protospacer strand) to a guide RNA in a target DNA sequence.

[0756] The fusion protein described herein can effect target deamination in an editing window different from canonical base editing. In some embodiments, a target nucleobase is from about 1 to about 20 bases upstream of a PAM sequence in the target polynucleotide sequence. In some embodiments, a target nucleobase is from about 2 to about 12 bases upstream of a PAM sequence in the target polynucleotide sequence. In some embodiments, a target nucleobase is from about 1 to 9 base pairs, about 2 to 10 base pairs, about 3 to 11 base pairs, about 4 to 12 base pairs, about 5 to 13 base pairs, about 6 to 14 base paris, about 7 to 15 base pairs, about 8 to 16 base pairs, about 9 to 17 base pairs, about 10 to 18 base pairs, about 11 to 19 base pairs, about 12 to 20 base pairs, about 1 to 7 base pairs, about 2 to 8 base pairs, about 3 to 9 base pairs, about 4 to 10 base pairs, about 5 to 11 base pairs, about 6 to 12 base pairs, about 7 to 13 base pairs, about 8 to 14 base pairs, about 9 to 15 base pairs, about 10 to 16 base pairs, about 11 to 17 base pairs, about 12 to 18 base pairs, about 13 to 19 base pairs, about 14 to 20 base pairs, about 1 to 5 base pairs, about 2 to 6 base pairs, about 3 to 7 base pairs, about 4 to 8 base pairs, about 5 to 9 base pairs, about 6 to 10 base pairs, about 7 to 11 base pairs, about 8 to 12 base pairs, about 9 to 13 base pairs, about 10 to 14 base pairs, about 11 to 15 base pairs, about 12 to 16 base paris, about 13 to 17 base paris, about 14 to 18 base pairs, about 15 to 19 base pairs, about 16 to 20 base pairs, about 1 to 3 base pairs, about 2 to 4 base pairs, about 3 to 5 base pairs, about 4 to 6 base pairs, about 5 to 7 base pairs, about 6 to 8 base pairs, about 7 to 9 base pairs, about 8 to 10 base pairs, about 9 to 11 base pairs, about 10 to 12 base pairs, about 11 to 13 base pairs, about 12 to 14 base pairs, about 13 to 15 base pairs, about 14 to 16 base pairs, about 15 to 17 base pairs, about 16 to 18 base pairs, about 17 to 19 base pairs, about 18 to 20 base pairs away or upstream of the PAM sequence. In some embodiments, a target nucleobase is about 1, 2, 3, 4, 5, 6, 7, 8, 9, 10, 11, 12, 13, 14, 15, 16, 17, 18, 19, 20, or more base pairs away or upstream of the PAM sequence. In some embodiemtns, a target nucleobase is about 1, 2, 3, 4, 5, 6, 7, 8, or 9 base pairs upstream of the PAM sequence. In some embodiments, a target nucleobase is about 2, 3, 4, or 6 base pairs upstream of the PAM sequence.

[0757] Accordingly, also provided herein are fusion protein libraries and method for using same to optimize base editing that allow for alternative preferred base editing windows compared to canonical base editors, e.g., BE4. In some embodiments, the disclosure provides a protein library for optimized base editing comprising a plurality of fusion proteins, wherein each one of the plurality of fusion proteins comprises a deaminase flanked by a N-terminal fragment and a C-terminal fragment of a Cas9 polypeptide, wherein the N-terminal fragment of each one of the fusion proteins differs from the N-terminal fragments of the rest of the plurality of fusion proteins or wherein the C-terminal fragment of each one of the fusion proteins differs from the C-terminal fragments of the rest of the plurality of fusion proteins, wherein the deaminase of each one of the fusion proteins deaminates a target nucleobase in proximity to a Protospacer Adjacent Motif (PAM) sequence in a target polynucleotide sequence, and wherein the N terminal fragment or the C terminal fragment binds the target polynucleotide sequence. In some embodiments, for each nucleobase within a CRISPR R-loop, at least one of the plurality of fusion proteins deaminates the nucleobase. In some embodiments, for each nucleobase within of a target polynucleotide from 1 to 20 base pairs away of a PAM sequence, at least one of the plurality of fusion proteins deaminates the nucleobase. In some embodiments, provided herein is a kit comprising the fusion protein library that allows for optimized base editing.

[0758] The fusion protein can comprise more than one heterologous polypeptide. For example, the fusion protein can additionally comprise one or more UGI domains and/or one or more nuclear localization signals. The two or more heterologous domains can be inserted in tandem. The two or more heterologous domains can be inserted at locations such that they are not in tandem in the NapDNAbp.

[0759] In some embodiments, the base editor is a fusion protein comprising a napDNAbp domain (e.g., Cas12-derived domain) with an internally fused nucleobase editing domain (e.g., all or a portion of a deaminase domain). In some embodiments, the napDNAbp is a Cas12b. In some embodiments, the base editor comprises a BhCas12b domain with an internally fused TadA*8 domain inserted at the loci provided on Table 18.

TABLE 18
Insertion loci in Cas12b proteins

| BhCas12b | Insertion site | Inserted between aa |
|---|---|---|
| position 1 | 153 | PS |
| position 2 | 255 | KE |
| position 3 | 306 | DE |
| position 4 | 980 | DG |
| position 5 | 1019 | KL |
| position 6 | 534 | FP |
| position 7 | 604 | KG |
| position 8 | 344 | HF |
| BvCas12b | Insertion site | Inserted between aa |
| position 1 | 147 | PD |
| position 2 | 248 | GG |
| position 3 | 299 | PE |
| position 4 | 991 | GE |
| position 5 | 1031 | KM |
| AaCas12b | Insertion site | Inserted between aa |
| position 1 | 157 | PG |
| position 2 | 258 | VG |
| position 3 | 310 | DP |
| position 4 | 1008 | GE |
| position 5 | 1044 | GK |

[0760] In some embodiments, a base editor can comprise multiple domains. For example, the base editor comprising a napDNAbp domain derived from a Cas12 protein can comprise an REC lobe and an NUC lobe corresponding to the REC lobe and NUC lobe of a wild-type or natural Cas12. In another example, the base editor can comprise one or more of a RuvC domainWED domain. In some embodiments, one or more domains of the base editor comprise a mutation (e.g., substitution, insertion, deletion) relative to a wild type version of a polypeptide comprising the domain.

[0761] A fusion protein of the invention comprises a nucleic acid editing domain. In some embodiments, the nucleic acid editing domain can catalyze a C to U base change. In some embodiments, the nucleic acid editing domain is a deaminase domain. In some embodiments, the deaminase is a cytidine deaminase or an adenosine deaminase. In some embodiments, the deaminase is an apolipoprotein B mRNA-editing complex (APOBEC) family deaminase. In some embodiments, the deaminase is an AiPOBECl deaminase. In some embodiments, the deaminase is an APOBEC2 deaminase. In some embodiments, the deaminase is an APOBEC3 deaminase. In some embodiments, the deaminase is an APOBEC3 A deaminase. In some embodiments, the deaminase is an APOBEC3B deaminase. In some embodiments, the deaminase is an APOBEC3C deaminase. In some embodiments, the deaminase is an APOBEC3D deaminase. In some embodiments, the deaminase is an APOBEC3E deaminase. In some embodiments, the deaminase is an APOBEC3F deaminase. In some embodiments, the deaminase is an APOBEC3G deaminase. In some embodiments, the deaminase is an APOBEC3H deaminase. In some embodiments, the deaminase is an APOBEC4 deaminase.

[0762] In some embodiments, the deaminase is an activation-induced deaminase (AID).

[0763] In some embodiments, the deaminase is a vertebrate deaminase. In some embodiments, the deaminase is an invertebrate deaminase. In some embodiments, the deaminase is a human, chimpanzee, gorilla, monkey, cow, dog, rat, or mouse deaminase. In some embodiments, the deaminase is a human deaminase. In some embodiments, the deaminase is a rat deaminase, e.g., rAPOBECl. In some embodiments, the deaminase is a Petromyzon marinus cytidine deaminase 1 (pmCDA1). In some embodiments, the deaminase is a human APOBEC3G. In some embodiments, the deaminase is a fragment of the human APOBEC3G. In some embodiments, the nucleic acid editing domain is at least 80%, at least 85%, at least 90%, at least 92%, at least 95%, at least 96%, at least 97%, at least 98%, at least 99%), or at least 99.5% identical to the deaminase domain of any deaminase described herein.

### Linkers

[0764] In certain embodiments, linkers may be used to link any of the peptides or peptide domains of the invention. The linker may be as simple as a covalent bond, or it may be a polymeric linker many atoms in length. In certain embodiments, the linker is a polypeptide or based on amino acids. In other embodiments, the linker is not peptide-like. In certain embodiments, the linker is a covalent bond (e.g., a carbon-carbon bond, disulfide bond, carbon-heteroatom bond, etc.). In certain embodiments, the linker is a carbon-nitrogen bond of an amide linkage. In certain embodiments, the linker is a cyclic or acyclic, substituted or unsubstituted, branched or unbranched aliphatic or heteroaliphatic linker. In certain embodiments, the linker is polymeric (e.g., polyethylene, polyethylene glycol, polyamide, polyester, etc.). In certain embodiments, the linker comprises a monomer, dimer, or polymer of aminoalkanoic acid. In certain embodiments, the linker comprises an aminoalkanoic acid (e.g., glycine, ethanoic acid, alanine, beta-alanine, 3-aminopropanoic acid, 4-aminobutanoic acid, 5-pentanoic acid, etc.). In certain embodiments, the linker comprises a monomer, dimer, or polymer of aminohexanoic acid (Ahx). In certain embodiments, the linker is based on a carbocyclic moiety (e.g., cyclopentane, cyclohexane). In other embodiments, the linker comprises a polyethylene glycol moiety (PEG). In other embodiments, the linker comprises amino acids. In certain embodiments, the linker comprises a peptide. In certain embodiments, the linker comprises an aryl or heteroaryl moiety. In certain embodiments, the linker is based on a phenyl ring. The linker may include functionalized moieties to facilitate attachment of a nucleophile (e.g., thiol, amino) from the peptide to the linker. Any electrophile may be used as part of the linker. Exemplary electrophiles include, but are not limited to, activated esters, activated amides, Michael acceptors, alkyl halides, aryl halides, acyl halides, and isothiocyanates.

[0765] In some embodiments, the linker is an amino acid or a plurality of amino acids (e.g., a peptide or protein). In some embodiments, the linker is a bond (e.g., a covalent bond), an organic molecule, group, polymer, or chemical moiety. In some embodiments, the linker is about 3 to about 104 (e.g., 5, 6, 7, 8, 9, 10, 11, 12, 13, 14, 15, 16, 17, 18, 19, 20, 21, 22, 23, 24, 25, 26, 27, 28, 29, 30, 31, 32, 33, 34, 35, 36, 37, 38, 39, 40, 41, 42, 43, 44, 45, 46, 47, 48, 49, 50, 55, 60, 65, 70, 75, 80, 85, 90, 95, or 100) amino acids in length.

[0766] In some embodiments, the adenosine deaminase and the napDNAbp are fused via a linker that is 4, 16, 32, or 104 amino acids in length. In some embodiments, the linker is about 3 to about 104 amino acids in length. In some embodiments, any of the fusion proteins provided herein, comprise an adenosine deaminase and a Cas9 domain that are fused to each other via a linker. Various linker lengths and flexibilities between the deaminase domain (e.g., an engineered ecTadA) and the Cas9 domain can be employed (e.g., ranging from very flexible linkers of the form (GGGS)ₙ, (GGGGS)ₙ, and (G)ₙ to more rigid linkers of the form (EAAAK)ₙ, (SGGS)ₙ, SGSETPGTSESATPES (see, e.g., Guilinger J P, Thompson D B, Liu D R. Fusion of catalytically inactive Cas9 to FokI nuclease improves the specificity of genome modification. Nat. Biotechnol. 2014; 32(6): 577-82; the entire contents are incorporated herein by reference) and (XP)ₙ) in order to achieve the optimal length for activity for the nucleobase editor. In some embodiments, n is 1, 2, 3, 4, 5, 6, 7, 8, 9, 10, 11, 12, 13, 14, or 15. In some embodiments, the linker comprises a (GGS)ₙ motif, wherein n is 1, 3, or 7. In some embodiments, the adenosine deaminase and the Cas9 domain of any of the fusion proteins provided herein are fused via a linker (e.g., an XTEN linker) comprising the amino acid sequence SGSETPGTSESATPES.

Cas9 Complexes with Guide RNAs

[0767] Some aspects of this disclosure provide complexes comprising any of the fusion proteins provided herein, and a guide RNA (e.g., a guide that targets A\mutation) bound to a CAS9 domain (e.g., a dCas9, a nuclease active Cas9, or a Cas9 nickase) of fusion protein. These complexes are also termed ribonucleoproteins (RNPs). Any method for linking the fusion protein domains can be employed (e.g., ranging from very flexible linkers of the form (GGGS)ₙ, (GGGGS)ₙ, and (G)ₙ to more rigid linkers of the form (EAAAK)ₙ, (SGGS)ₙ, SGSETPGTSESATPES (see, e.g., Guilinger J P, Thompson D B, Liu D R. Fusion of catalytically inactive Cas9 to FokI nuclease improves the specificity of genome modification. Nat. Biotechnol. 2014; 32(6): 577-82; the entire contents are incorporated herein by reference) and (XP)ₙ) in order to achieve the optimal length for activity for the nucleobase editor. In some embodiments, n is 1, 2, 3, 4, 5, 6, 7, 8, 9, 10, 11, 12, 13, 14, or 15. In some embodiments, the linker comprises a (GGS)ₙ motif, wherein n is 1, 3, or 7. In some embodiments, the Cas9 domain of the fusion proteins provided herein are fused via a linker comprising the amino acid sequence SGSETPGTSESATPES.

[0768] In some embodiments, the guide nucleic acid (e.g., guide RNA) is from 15-100 nucleotides long and comprises a sequence of at least 10 contiguous nucleotides that is complementary to a target sequence. In some embodiments, the guide RNA is 15, 16, 17, 18, 19, 20, 21, 22, 23, 24, 25, 26, 27, 28, 29, 30, 31, 32, 33, 34, 35, 36, 37, 38, 39, 40, 41, 42, 43, 44, 45, 46, 47, 48, 49, or 50 nucleotides long. In some embodiments, the guide RNA comprises a sequence of 15, 16, 17, 18, 19, 20, 21, 22, 23, 24, 25, 26, 27, 28, 29, 30, 31, 32, 33, 34, 35, 36, 37, 38, 39, or 40 contiguous nucleotides that is complementary to a target sequence. In some embodiments, the target sequence is a DNA sequence. In some embodiments, the target sequence is a sequence in the genome of a bacteria, yeast, fungi, insect, plant, or animal. In some embodiments, the target sequence is a sequence in the genome of a human. In some embodiments, the 3′ end of the target sequence is immediately adjacent to a canonical PAM sequence (NGG). In some embodiments, the 3′ end of the target sequence is immediately adjacent to a non-canonical PAM sequence (e.g., a sequence listed in Table 1 or 5′-NAA-3′). In some embodiments, the guide nucleic acid (e.g., guide RNA) is complementary to a sequence in a gene of interest (e.g., a gene associated with a disease or disorder).

[0769] Some aspects of this disclosure provide methods of using the fusion proteins, or complexes provided herein. For example, some aspects of this disclosure provide methods comprising contacting a DNA molecule with any of the fusion proteins provided herein, and with at least one guide RNA, wherein the guide RNA is about 15-100 nucleotides long and comprises a sequence of at least 10 contiguous nucleotides that is complementary to a target sequence. In some embodiments, the 3′ end of the target sequence is immediately adjacent to a canonical PAM sequence (NGG). In some embodiments, the 3′ end of the target sequence is not immediately adjacent to a canonical PAM sequence (NGG). In some embodiments, the 3′ end of the target sequence is immediately adjacent to an AGC, GAG, TTT, GTG, or CAA sequence. In some embodiments, the 3′ end of the target sequence is immediately adjacent to an NGA, NGCG, NGN, NNGRRT, NNNRRT, NGCG, NGCN, NGTN, NGTN, NGTN, or 5′ (TTTV) sequence.

[0770] Some aspects of this disclosure provide complexes comprising any of the fusion proteins provided herein, and a guide RNA that targets the AG splice acceptor in intronic sequence situated 5′ of an exon of a disease-associated or disease-causing gene. In an embodiment, the targeted intronic AG splice acceptor is situated 5′ of exon 3 of the SOD1 gene associated with ALS.

[0771] In some embodiments, the guide nucleic acid (e.g., guide RNA) is from 15-100 nucleotides long and comprises a sequence of at least 10 contiguous nucleotides that is complementary to a target sequence. In some embodiments, the guide RNA is 15, 16, 17, 18, 19, 20, 21, 22, 23, 24, 25, 26, 27, 28, 29, 30, 31, 32, 33, 34, 35, 36, 37, 38, 39, 40, 41, 42, 43, 44, 45, 46, 47, 48, 49, or 50 nucleotides long. In some embodiments, the guide RNA comprises a sequence of 15, 16, 17, 18, 19, 20, 21, 22, 23, 24, 25, 26, 27, 28, 29, 30, 31, 32, 33, 34, 35, 36, 37, 38, 39, or 40 contiguous nucleotides that is complementary to a target sequence. In some embodiments, the target sequence is a DNA sequence. In some embodiments, the target sequence is a sequence in the genome of a bacteria, yeast, fungi, insect, plant, or animal. In some embodiments, the target sequence is a sequence in the genome of a human. In some embodiments, the 3′ end of the target sequence is immediately adjacent to a canonical PAM sequence (NGG). In some embodiments, the 3′ end of the target sequence is immediately adjacent to a non-canonical PAM sequence (e.g., a sequence listed in Table 1 or 5′-NAA-3′). In some embodiments, the guide nucleic acid (e.g., guide RNA) is complementary to the AG splice acceptor sequence situated in the intron 5′ of exon 3 of the SOD1 gene.

[0772] Some aspects of this disclosure provide methods of using the fusion proteins, or complexes provided herein. For example, some aspects of this disclosure provide methods comprising contacting a DNA molecule with any of the fusion proteins provided herein, and with at least one guide RNA, wherein the guide RNA is about 15-100 nucleotides long and comprises a sequence of at least 10 contiguous nucleotides that is complementary to a target sequence. In some embodiments, the 3′ end of the target sequence is immediately adjacent to an AGC, GAG, TTT, GTG, or CAA sequence. In some embodiments, the 3′ end of the target sequence is immediately adjacent to an NGA, NAA, NGCG, NGN, NNGRRT, NNNRRT, NGCG, NGCN, NGTN, NGTN, NGTN, or 5′ (TTTV) sequence.

[0773] It will be understood that the numbering of the specific positions or residues in the respective sequences depends on the particular protein and numbering scheme used. Numbering might be different, e.g., in precursors of a mature protein and the mature protein itself, and differences in sequences from species to species may affect numbering. One of skill in the art will be able to identify the respective residue in any homologous protein and in the respective encoding nucleic acid by methods well known in the art, e.g., by sequence alignment and determination of homologous residues.

[0774] It will be apparent to those of skill in the art that in order to target any of the fusion proteins disclosed herein, to a target site, e.g., a site comprising a mutation to be edited, it is typically necessary to co-express the fusion protein together with a guide RNA. As explained in more detail elsewhere herein, a guide RNA typically comprises a tracrRNA framework allowing for Cas9 binding, and a guide sequence, which confers sequence specificity to the Cas9:nucleic acid editing enzyme/domain fusion protein. Alternatively, the guide RNA and tracrRNA may be provided separately, as two nucleic acid molecules. In some embodiments, the guide RNA comprises a structure, wherein the guide sequence comprises a sequence that is complementary to the target sequence. The guide sequence is typically 20 nucleotides long. The sequences of suitable guide RNAs for targeting Cas9:nucleic acid editing enzyme/domain fusion proteins to specific genomic target sites will be apparent to those of skill in the art based on the instant disclosure. Such suitable guide RNA sequences typically comprise guide sequences that are complementary to a nucleic sequence within 50 nucleotides upstream or downstream of the target nucleotide to be edited. Some exemplary guide RNA sequences suitable for targeting any of the provided fusion proteins to specific target sequences are provided herein.

Cas12 Complexes with Guide RNAs

[0775] Some aspects of this disclosure provide complexes comprising any of the fusion proteins provided herein, and a guide RNA (e.g., a guide that targets a target polynucleotide for editing).

[0776] In some embodiments, the guide nucleic acid (e.g., guide RNA) is from 15-100 nucleotides long and comprises a sequence of at least 10 contiguous nucleotides that is complementary to a target sequence. In some embodiments, the guide RNA is 15, 16, 17, 18, 19, 20, 21, 22, 23, 24, 25, 26, 27, 28, 29, 30, 31, 32, 33, 34, 35, 36, 37, 38, 39, 40, 41, 42, 43, 44, 45, 46, 47, 48, 49, or 50 nucleotides long. In some embodiments, the guide RNA comprises a sequence of 15, 16, 17, 18, 19, 20, 21, 22, 23, 24, 25, 26, 27, 28, 29, 30, 31, 32, 33, 34, 35, 36, 37, 38, 39, or 40 contiguous nucleotides that is complementary to a target sequence. In some embodiments, the target sequence is a DNA sequence. In some embodiments, the target sequence is a sequence in the genome of a bacteria, yeast, fungi, insect, plant, or animal. In some embodiments, the target sequence is a sequence in the genome of a human. In some embodiments, the 3′ end of the target sequence is immediately adjacent to a canonical PAM sequence. In some embodiments, the 3′ end of the target sequence is immediately adjacent to a non-canonical PAM sequence.

[0777] Some aspects of this disclosure provide methods of using the fusion proteins, or complexes provided herein. For example, some aspects of this disclosure provide methods comprising contacting a DNA molecule with any of the fusion proteins provided herein, and with at least one guide RNA, wherein the guide RNA is about 15-100 nucleotides long and comprises a sequence of at least 10 contiguous nucleotides that is complementary to a target sequence. In some embodiments, the 3′ end of the target sequence is immediately adjacent to an e.g., TTN, DTTN, GTTN, ATTN, ATTC, DTTNT, WTTN, HATY, TTTN, TTTV, TTTC, TG, RTR, or YTN PAM site.

[0778] It will be understood that the numbering of the specific positions or residues in the respective sequences depends on the particular protein and numbering scheme used. Numbering might be different, e.g., in precursors of a mature protein and the mature protein itself, and differences in sequences from species to species may affect numbering. One of skill in the art will be able to identify the respective residue in any homologous protein and in the respective encoding nucleic acid by methods well known in the art, e.g., by sequence alignment and determination of homologous residues.

[0779] It will be apparent to those of skill in the art that in order to target any of the fusion proteins disclosed herein, to a target site, e.g., a site comprising a mutation to be edited, it is typically necessary to co-express the fusion protein together with a guide RNA. As explained in more detail elsewhere herein, a guide RNA typically comprises a tracrRNA framework allowing for Cas12 binding, and a guide sequence, which confers sequence specificity to the Cas12:nucleic acid editing enzyme/domain fusion protein. Alternatively, the guide RNA and tracrRNA may be provided separately, as two nucleic acid molecules. In some embodiments, the guide RNA comprises a structure, wherein the guide sequence comprises a sequence that is complementary to the target sequence. The guide sequence is typically 20 nucleotides long. The sequences of suitable guide RNAs for targeting Cas12:nucleic acid editing enzyme/domain fusion proteins to specific genomic target sites will be apparent to those of skill in the art based on the instant disclosure. Such suitable guide RNA sequences typically comprise guide sequences that are complementary to a nucleic sequence within 50 nucleotides upstream or downstream of the target nucleotide to be edited. Some exemplary guide RNA sequences suitable for targeting any of the provided fusion proteins to specific target sequences are provided herein.

[0780] The domains of the base editor disclosed herein can be arranged in any order as long as the deaminase domain is internalized in the Cas12 protein. Non-limiting examples of a base editor comprising a fusion protein comprising e.g., a Cas12 domain and a deaminase domain can be arranged as following:
[0781] NH2-[Cas12 domain]-Linker1-[ABE8]-Linker2-[Cas12 domain]-COOH;
[0782] NH2-[Cas12 domain]-Linker1-[ABE8]-[Cas12 domain]-COOH;
[0783] NH2-[Cas12 domain]-[ABE8]-Linker2-[Cas12 domain]-COOH;
[0784] NH2-[Cas12 domain]-[ABE8]-[Cas12 domain]-COOH;
[0785] NH2-[Cas12 domain]-Linker1-[ABE8]-Linker2-[Cas12 domain]-[inosine BER inhibitor]-COOH;
[0786] NH2-[Cas12 domain]-Linker1-[ABE8]-[Cas12 domain]-[inosine BER inhibitor]-COOH;
[0787] NH2-[Cas12 domain]-[ABE8]-Linker2-[Cas12 domain]-[inosine BER inhibitor]-COOH;
[0788] NH₂-[Cas12 domain]-[ABE8]-[Cas12 domain]-[inosine BER inhibitor]-COOH;
[0789] NH2-[inosine BER inhibitor]-[Cas12 domain]-Linker1-[ABE8]-Linker2-[Cas12 domain]-COOH;
[0790] NH2-[inosine BER inhibitor]-[Cas12 domain]-Linker1-[ABE8]-[Cas12 domain]-COOH;
[0791] NH2-[inosine BER inhibitor]-[Cas12 domain]-[ABE8]-Linker2-[Cas12 domain]-COOH;
[0792] NH2-[inosine BER inhibitor]NH2-[Cas12 domain]-[ABE8]-[Cas12 domain]-COOH;

[0793] Additionally, in some cases, a Gam protein can be fused to an N terminus of a base editor. In some cases, a Gam protein can be fused to a C terminus of a base editor. The Gam protein of bacteriophage Mu can bind to the ends of double strand breaks (DSBs) and protect them from degradation. In some embodiments, using Gam to bind the free ends of DSB can reduce indel formation during the process of base editing. In some embodiments, 174-residue Gam protein is fused to the N terminus of the base editors. See. Komor, A. C., et al., “Improved base excision repair inhibition and bacteriophage Mu Gam protein yields C:G-to-T:A base editors with higher efficiency and product purity” Science Advances 3:eaao4774 (2017). In some cases, a mutation or mutations can change the length of a base editor domain relative to a wild type domain. For example, a deletion of at least one amino acid in at least one domain can reduce the length of the base editor. In another case, a mutation or mutations do not change the length of a domain relative to a wild type domain. For example, substitution(s) in any domain does/do not change the length of the base editor. Non-limiting examples of such base editors, where the length of all the domains is the same as the wild type domains, can include:
[0794] NH2-[Cas12 domain]-Linker1-[APOBEC1]-Linker2-[Cas12 domain]-COOH;
[0795] NH2-[Cas12 domain]-Linker1-[APOBEC1]-[Cas12 domain]-COOH;
[0796] NH2-[Cas12 domain]-[APOBEC1]-Linker2-[Cas12 domain]-COOH;
[0797] NH2-[Cas12 domain]-[APOBECl]-[Cas12 domain]-COOH;
[0798] NH2-[Cas12 domain]-Linker1-[APOBEC1]-Linker2-[Cas12 domain]-[UGI]-COOH;
[0799] NH2-[Cas12 domain]-Linker1-[APOBEC1]-[Cas12 domain]-[UGI]-COOH;
[0800] NH2-[Cas12 domain]-[APOBEC1]-Linker2-[Cas12 domain]-[UGI]-COOH;
[0801] NH2-[Cas12 domain]-[APOBEC1]-[Cas12 domain]-[UGI]-COOH;
[0802] NH2-[UGI]-[Cas12 domain]-Linker1-[APOBEC1]-Linker2-[Cas12 domain]-COOH;
[0803] NH2-[UGI]-[Cas12 domain]-Linker1-[APOBECl]-[Cas12 domain]-COOH
[0804] NH2-[UGI]-[Cas12 domain]-[APOBEC1]-Linker2-[Cas12 domain]-COOH;
[0805] NH2-[UGI]-[Cas12 domain]-[APOBEC1]-[Cas12 domain]-COOH

[0806] In some embodiments, the base editing fusion proteins provided herein need to be positioned at a precise location, for example, where a target base is placed within a defined region (e.g., a “deamination window”). In some cases, a target can be within a 4-base region. In some cases, such a defined target region can be approximately 15 bases upstream of the PAM. See Komor, A. C., et al., “Programmable editing of a target base in genomic DNA without double-stranded DNA cleavage” Nature 533, 420-424 (2016); Gaudelli, N. M., et al., “Programmable base editing of A⋅T to G⋅C in genomic DNA without DNA cleavage” Nature 551, 464-471 (2017); and Komor, A. C., et al., “Improved base excision repair inhibition and bacteriophage Mu Gam protein yields C:G-to-T:A base editors with higher efficiency and product purity” Science Advances 3:eaao4774 (2017), the entire contents of which are hereby incorporated by reference.

[0807] A defined target region can be a deamination window. A deamination window can be the defined region in which a base editor acts upon and deaminates a target nucleotide. In some embodiments, the deamination window is within a 2, 3, 4, 5, 6, 7, 8, 9, or 10 base regions. In some embodiments, the deamination window is 5, 6, 7, 8, 9, 10, 11, 12, 13, 14, 15, 16, 17, 18, 19, 20, 21, 22, 23, 24, or 25 bases upstream of the PAM.

[0808] The base editors of the present disclosure can comprise any domain, feature or amino acid sequence which facilitates the editing of a target polynucleotide sequence. For example, in some embodiments, the base editor comprises a nuclear localization sequence (NLS). In some embodiments, an NLS of the base editor is localized between a deaminase domain and a napDNAbp domain. In some embodiments, an NLS of the base editor is localized C-terminal to a napDNAbp domain.

[0809] Protein domains included in the fusion protein can be a heterologous functional domain. Non-limiting examples of protein domains which can be included in the fusion protein include a deaminase domain (e.g., cytidine deaminase and/or adenosine deaminase), a uracil glycosylase inhibitor (UGI) domain, epitope tags, and reporter gene sequences. Protein domains can be a heterologous functional domain, for example, having one or more of the following activities: transcriptional activation activity, transcriptional repression activity, transcription release factor activity, gene silencing activity, chromatin modifying activity, epigenetic modifying activity, histone modification activity, RNA cleavage activity, and nucleic acid binding activity. Such heterologous functional domains can confer a function activity, such as modification of a target polypeptide associated with target DNA (e.g., a histone, a DNA binding protein, etc.), leading to, for example, histone methylation, histone acetylation, histone ubiquitination, and the like. Other functions and/or activities conferred can include transposase activity, integrase activity, recombinase activity, ligase activity, ubiquitin ligase activity, deubiquitinating activity, adenylation activity, deadenylation activity, SUMOylation activity, deSUMOylation activity, or any combination of the above.

[0810] A domain may be detected or labeled with an epitope tag, a reporter protein, other binding domains. Non-limiting examples of epitope tags include histidine (His) tags, V5 tags, FLAG tags, influenza hemagglutinin (HA) tags, Myc tags, VSV-G tags, and thioredoxin (Trx) tags. Examples of reporter genes include, but are not limited to, glutathione-5-transferase (GST), horseradish peroxidase (HRP), chloramphenicol acetyltransferase (CAT) beta-galactosidase, beta-glucuronidase, luciferase, green fluorescent protein (GFP), HcRed, DsRed, cyan fluorescent protein (CFP), yellow fluorescent protein (YFP), and autofluorescent proteins including blue fluorescent protein (BFP). Additional protein sequences can include amino acid sequences that bind DNA molecules or bind other cellular molecules, including but not limited to maltose binding protein (MBP), S-tag, Lex A DNA binding domain (DBD) fusions, GAL4 DNA binding domain fusions, and herpes simplex virus (HSV) BP16 protein fusions.

[0811] In some embodiments, BhCas12b guide polynucleotide has the following sequence:

BhCas12b sgRNA scaffold (underlined) + 20 nt to
23 nt guide sequence (denoted by Nₙ)
5′GTTCTGTCTTTTGGTCAGGACAACCGTCTAGCTATAAGTGCTGCAG
GGTGTGAGAAACTCCTATTGCTGGACGATGTCTCTTACGAGGCATTAG
CACNNNNNNNNNNNNNNNNNNNN-3′

[0812] In some embodiments, BvCas12b and AaCas12b guide polynucleotides have the following sequences:

ByCas12b sgRNA scaffold (underlined) + 20 nt
to 23 nt guide sequence (denoted by Nₙ)
5′GACCTATAGGGTCAATGAATCTGTGCGTGTGCCATAAGTAATTAAAA
ATTACCCACCACAGGAGCACCTGAAAACAGGTGCTTGGCACNNNNNNNN
NNNNNNNNNNNN-3′
AaCas12b sgRNA scaffold (underlined) + 20 nt to
23 nt guide sequence (denoted by Nₙ
5′GTCTAAAGGACAGAATTTTTCAACGGGTGTGCCAATGGCCACTTTCC
AGGTGGCAAAGCCCGTTGAACTTCTCAAAAAGAACGATCTGAGAAGTGG
CACNNNNNNNNNNNNNNNNNNNN-3′

### Methods of Using Fusion Proteins Comprising Adenosine Deaminase Variant and a Cas9 Domain

[0813] Some aspects of this disclosure provide methods of using the fusion proteins, or complexes provided herein. For example, some aspects of this disclosure provide methods comprising contacting a DNA molecule encoding a mutant form of a protein with any of the fusion proteins provided herein, and with at least one guide RNA, wherein the guide RNA is about 15-100 nucleotides long and comprises a sequence of at least 10 contiguous nucleotides that is complementary to a target sequence. In some embodiments, the 3′ end of the target sequence is immediately adjacent to a canonical PAM sequence (NGG). In some embodiments, the 3′ end of the target sequence is not immediately adjacent to a canonical PAM sequence (NGG). In some embodiments, the 3′ end of the target sequence is immediately adjacent to an AGC, GAG, TTT, GTG, or CAA sequence. In some embodiments, the 3′ end of the target sequence is immediately adjacent to an NGA, NGCG, NGN, NNGRRT, NNNRRT, NGCG, NGCN, NGTN, NGTN, NGTN, or 5′ (TTTV) sequence.

[0814] It will be understood that the numbering of the specific positions or residues in the respective sequences depends on the particular protein and numbering scheme used. Numbering might be different, e.g., in precursors of a mature protein and the mature protein itself, and differences in sequences from species to species may affect numbering. One of skill in the art will be able to identify the respective residue in any homologous protein and in the respective encoding nucleic acid by methods well known in the art, e.g., by sequence alignment and determination of homologous residues.

[0815] It will be apparent to those of skill in the art that in order to target any of the fusion proteins comprising a Cas9 domain and an adenosine deaminase variant (e.g., ABE8), as disclosed herein, to a target site, e.g., a site comprising a mutation to be edited, it is typically necessary to co-express the fusion protein together with a guide RNA, e.g., an sgRNA. As explained in more detail elsewhere herein, a guide RNA typically comprises a tracrRNA framework allowing for Cas9 binding, and a guide sequence, which confers sequence specificity to the Cas9:nucleic acid editing enzyme/domain fusion protein. Alternatively, the guide RNA and tracrRNA may be provided separately, as two nucleic acid molecules. In some embodiments, the guide RNA comprises a structure, wherein the guide sequence comprises a sequence that is complementary to the target sequence. The guide sequence is typically 20 nucleotides long. The sequences of suitable guide RNAs for targeting Cas9:nucleic acid editing enzyme/domain fusion proteins to specific genomic target sites will be apparent to those of skill in the art based on the instant disclosure. Such suitable guide RNA sequences typically comprise guide sequences that are complementary to a nucleic sequence within 50 nucleotides upstream or downstream of the target nucleotide to be edited. Some exemplary guide RNA sequences suitable for targeting any of the provided fusion proteins to specific target sequences are provided herein.

### Base Editor Efficiency

[0816] CRISPR-Cas9 nucleases have been widely used to mediate targeted genome editing. In most genome editing applications, Cas9 forms a complex with a guide polynucleotide (e.g., single guide RNA (sgRNA)) and induces a double-stranded DNA break (DSB) at the target site specified by the sgRNA sequence. Cells primarily respond to this DSB through the non-homologous end-joining (NHEJ) repair pathway, which results in stochastic insertions or deletions (indels) that can cause frameshift mutations that disrupt the gene. In the presence of a donor DNA template with a high degree of homology to the sequences flanking the DSB, gene correction can be achieved through an alternative pathway known as homology directed repair (HDR). Unfortunately, under most non-perturbative conditions, HDR is inefficient, dependent on cell state and cell type, and dominated by a larger frequency of indels. As most of the known genetic variations associated with human disease are point mutations, methods that can more efficiently and cleanly make precise point mutations are needed. Base editing systems as provided herein provide a new way to provide genome editing without generating double-strand DNA breaks, without requiring a donor DNA template, and without inducing an excess of stochastic insertions and deletions.

[0817] In some aspects, methods that can disrupt splicing of the mRNA transcript of a disease-associated gene by precise base editing of the splice acceptor in the non-coding region 5′ of an exon of the disease-associated gene are needed and are provided herein. In an embodiment, the disease-associated gene is the SOD1 gene associated with ALS. In an embodiment, A to G base editing of the splice acceptor 5′ of exon 3 of the SOD1 gene is provided to disrupt splicing of the SOD1 mRNA transcript, thus yielding a truncated SOD1 protein product or a nonfunctional (null) protein.

[0818] The fusion proteins of the invention advantageously modify a specific nucleotide base encoding a protein comprising a mutation without generating a significant proportion of indels. An “indel,” as used herein, refers to the insertion or deletion of a nucleotide base within a nucleic acid. Such insertions or deletions can lead to frame shift mutations within a coding region of a gene. In some embodiments, it is desirable to generate base editors that efficiently modify (e.g., mutate or deaminate) a specific nucleotide within a nucleic acid, without generating a large number of insertions or deletions (i.e., indels) in the nucleic acid. In certain embodiments, any of the base editors provided herein are capable of generating a greater proportion of intended modifications (e.g., mutations or deaminations) versus indels.

[0819] In some embodiments, any of base editor systems provided herein result in less than 50%, less than 40%, less than 30%, less than 20%, less than 19%, less than 18%, less than 17%, less than 16%, less than 15%, less than 14%, less than 13%, less than 12%, less than 11%, less than 10%, less than 9%, less than 8%, less than 7%, less than 6%, less than 5%, less than 4%, less than 3%, less than 2%, less than 1%, less than 0.9%, less than 0.8%, less than 0.7%, less than 0.6%, less than 0.5%, less than 0.4%, less than 0.3%, less than 0.2%, less than 0.1%, less than 0.09%, less than 0.08%, less than 0.07%, less than 0.06%, less than 0.05%, less than 0.04%, less than 0.03%, less than 0.02%, or less than 0.01% indel formation in the target polynucleotide sequence.

[0820] In some embodiments, any of base editor systems comprising one of the ABE8 base editor variants described herein result in less than 50%, less than 40%, less than 30%, less than 20%, less than 19%, less than 18%, less than 17%, less than 16%, less than 15%, less than 14%, less than 13%, less than 12%, less than 11%, less than 10%, less than 9%, less than 8%, less than 7%, less than 6%, less than 5%, less than 4%, less than 3%, less than 2%, less than 1%, less than 0.9%, less than 0.8%, less than 0.7%, less than 0.6%, less than 0.5%, less than 0.4%, less than 0.3%, less than 0.2%, less than 0.1%, less than 0.09%, less than 0.08%, less than 0.07%, less than 0.06%, less than 0.05%, less than 0.04%, less than 0.03%, less than 0.02%, or less than 0.01% indel formation in the target polynucleotide sequence. In some embodiments, any of base editor systems comprising one of the ABE8 base editor variants described herein result in less than 0.8% indel formation in the target polynucleotide sequence. In some embodiments, any of base editor systems comprising one of the ABE8 base editor variants described herein result in at most 0.8% indel formation in the target polynucleotide sequence. In some embodiments, any of base editor systems comprising one of the ABE8 base editor variants described herein result in less than 0.3% indel formation in the target polynucleotide sequence. In some embodiments, any of base editor systems comprising one of the ABE8 base editor variants described results in lower indel formation in the target polynucleotide sequence compared to a base editor system comprising one of ABE7 base editors. In some embodiments, any of base editor systems comprising one of the ABE8 base editor variants described herein results in lower indel formation in the target polynucleotide sequence compared to a base editor system comprising an ABE7.10.

[0821] In some embodiments, any of base editor systems comprising one of the ABE8 base editor variants described herein has reduction in indel frequency compared to a base editor system comprising one of the ABE7 base editors. In some embodiments, any of base editor systems comprising one of the ABE8 base editor variants described herein has at least 0.01%, at least 1%, at least 2%, at least 3%, at least 4%, at least 5%, at least 10%, at least 15%, at least 20%, at least 25%, at least 30%, at least 35%, at least 40%, at least 45%, at least 50%, at least 55%, at least 60%, at least 65%, at least 70%, at least 75%, at least 80%, at least 85%, at least 90%, or at least 95% reduction in indel frequency compared to a base editor system comprising one of the ABE7 base editors. In some embodiments, a base editor system comprising one of the ABE8 base editor variants described herein has at least 0.01%, at least 1%, at least 2%, at least 3%, at least 4%, at least 5%, at least 10%, at least 15%, at least 20%, at least 25%, at least 30%, at least 35%, at least 40%, at least 45%, at least 50%, at least 55%, at least 60%, at least 65%, at least 70%, at least 75%, at least 80%, at least 85%, at least 90%, or at least 95% reduction in indel frequency compared to a base editor system comprising an ABE7.10.

[0822] The invention provides adenosine deaminase variants (e.g., ABE8 variants) that have increased efficiency and specificity. In particular, the adenosine deaminase variants described herein are more likely to edit a desired base within a polynucleotide, and are less likely to edit bases that are not intended to be altered (e.g., “bystanders”).

[0823] In some embodiments, any of the base editing system comprising one of the ABE8 base editor variants described herein has reduced bystander editing or mutations. In some embodiments, an unintended editing or mutation is a bystander mutation or bystander editing, for example, base editing of a target base (e.g., A or C) in an unintended or non-target position in a target window of a target nucleotide sequence. In some embodiments, any of the base editing system comprising one of the ABE8 base editor variants described herein has reduced bystander editing or mutations compared to a base editor system comprising an ABE7 base editor, e.g., ABE7.10. In some embodiments, any of the base editing system comprising one of the ABE8 base editor variants described herein has reduced bystander editing or mutations by at least 1%, at least 2%, at least 3%, at least 4%, at least 5%, at least 10%, at least 15%, at least 20%, at least 25%, at least 30%, at least 35%, at least 40%, at least 45%, at least 50%, at least 55%, at least 60%, at least 65%, at least 70%, at least 75%, at least 80%, at least 85%, at least 90%, at least 95%, or at least 99% compared to a base editor system comprising an ABE7 base editor, e.g., ABE7.10. In some embodiments, any of the base editing system comprising one of the ABE8 base editor variants described herein has reduced bystander editing or mutations by at least 1.1 fold, at least 1.2 fold, at least 1.3 fold, at least 1.4 fold, at least 1.5 fold, at least 1.6 fold, at least 1.7 fold, at least 1.8 fold, at least 1.9 fold, at least 2.0 fold, at least 2.1 fold, at least 2.2 fold, at least 2.3 fold, at least 2.4 fold, at least 2.5 fold, at least 2.6 fold, at least 2.7 fold, at least 2.8 fold, at least 2.9 fold, or at least 3.0 fold compared to a base editor system comprising an ABE7 base editor, e.g., ABE7.10.

[0824] In some embodiments, any of the base editing system comprising one of the ABE8 base editor variants described herein has reduced spurious editing. In some embodiments, an unintended editing or mutation is a spurious mutation or spurious editing, for example, non-specific editing or guide independent editing of a target base (e.g., A or C) in an unintended or non-target region of the genome. In some embodiments, any of the base editing system comprising one of the ABE8 base editor variants described herein has reduced spurious editing compared to abase editor system comprising an ABE7 base editor, e.g., ABE7.10. In some embodiments, any of the base editing system comprising one of the ABE8 base editor variants described herein has reduced spurious editing by at least 1%, at least 2%, at least 3%, at least 4%, at least 5%, at least 10%, at least 15%, at least 20%, at least 25%, at least 30%, at least 35%, at least 40%, at least 45%, at least 50%, at least 55%, at least 60%, at least 65%, at least 70%, at least 75%, at least 80%, at least 85%, at least 90%, at least 95%, or at least 99% compared to a base editor system comprising an ABE7 base editor, e.g., ABE7.10. In some embodiments, any of the base editing system comprising one of the ABE8 base editor variants described herein has reduced spurious editing by at least 1.1 fold, at least 1.2 fold, at least 1.3 fold, at least 1.4 fold, at least 1.5 fold, at least 1.6 fold, at least 1.7 fold, at least 1.8 fold, at least 1.9 fold, at least 2.0 fold, at least 2.1 fold, at least 2.2 fold, at least 2.3 fold, at least 2.4 fold, at least 2.5 fold, at least 2.6 fold, at least 2.7 fold, at least 2.8 fold, at least 2.9 fold, or at least 3.0 fold compared to a base editor system comprising an ABE7 base editor, e.g., ABE7.10.

[0825] Some aspects of the disclosure are based on the recognition that any of the base editors provided herein are capable of efficiently generating an intended mutation, such as a point mutation, in a nucleic acid (e.g., a nucleic acid within a genome of a subject) without generating a significant number of unintended mutations, such as unintended point mutations (i.e., mutation of bystanders). In some embodiments, any of the base editors provided herein are capable of generating at least 0.01% of intended mutations (i.e., at least 0.01% base editing efficiency). In some embodiments, any of the base editors provided herein are capable of generating at least 0.01%, 1%, 2%, 3%, 4%, 5%, 10%, 15%, 20%, 25%, 30%, 40%, 45%, 50%, 60%, 70%, 80%, 90%, 95%, or 99% of intended mutations.

[0826] In some embodiments, any of the ABE8 base editor variants described herein have at least 0.01%, at least 1%, at least 2%, at least 3%, at least 4%, at least 5%, at least 10%, at least 15%, at least 20%, at least 25%, at least 30%, at least 35%, at least 40%, at least 45%, at least 50%, at least 55%, at least 60%, at least 65%, at least 70%, at least 75%, at least 80%, at least 85%, at least 90%, at least 95%, or at least 99% base editing efficiency. In some embodiments, the base editing efficiency may be measured by calculating the percentage of edited nucleobases in a population of cells. In some embodiments, any of the ABE8 base editor variants described herein have base editing efficiency of at least 0.01%, at least 1%, at least 2%, at least 3%, at least 4%, at least 5%, at least 10%, at least 15%, at least 20%, at least 25%, at least 30%, at least 35%, at least 40%, at least 45%, at least 50%, at least 55%, at least 60%, at least 65%, at least 70%, at least 75%, at least 80%, at least 85%, at least 90%, at least 95%, or at least 99% as measured by edited nucleobases in a population of cells.

[0827] In some embodiments, any of the ABE8 base editor variants described herein has higher base editing efficiency compared to the ABE7 base editors. In some embodiments, any of the ABE8 base editor variants described herein have at least 1%, at least 2%, at least 3%, at least 4%, at least 5%, at least 10%, at least 15%, at least 20%, at least 25%, at least 30%, at least 35%, at least 40%, at least 45%, at least 50%, at least 55%, at least 60%, at least 65%, at least 70%, at least 75%, at least 80%, at least 85%, at least 90%, at least 95%, at least 99%, at least 100%, at least 105%, at least 110%, at least 115%, at least 120%, at least 125%, at least 130%, at least 135%, at least 140%, at least 145%, at least 150%, at least 155%, at least 160%, at least 165%, at least 170%, at least 175%, at least 180%, at least 185%, at least 190%, at least 195%, at least 200%, at least 210%, at least 220%, at least 230%, at least 240%, at least 250%, at least 260%, at least 270%, at least 280%, at least 290%, at least 300%, at least 310%, at least 320%, at least 330%, at least 340%, at least 350%, at least 360%, at least 370%, at least 380%, at least 390%, at least 400%, at least 450%, or at least 500% higher base editing efficiency compared to an ABE7 base editor, e.g., ABE7.10.

[0828] In some embodiments, any of the ABE8 base editor variants described herein has at least 1.1 fold, at least 1.2 fold, at least 1.3 fold, at least 1.4 fold, at least 1.5 fold, at least 1.6 fold, at least 1.7 fold, at least 1.8 fold, at least 1.9 fold, at least 2.0 fold, at least 2.1 fold, at least 2.2 fold, at least 2.3 fold, at least 2.4 fold, at least 2.5 fold, at least 2.6 fold, at least 2.7 fold, at least 2.8 fold, at least 2.9 fold, at least 3.0 fold, at least 3.1 fold, at least 3.2, at least 3.3 fold, at least 3.4 fold, at least 3.5 fold, at least 3.6 fold, at least 3.7 fold, at least 3.8 fold, at least 3.9 fold, at least 4.0 fold, at least 4.1 fold, at least 4.2 fold, at least 4.3 fold, at least 4.4 fold, at least 4.5 fold, at least 4.6 fold, at least 4.7 fold, at least 4.8 fold, at least 4.9 fold, or at least 5.0 fold higher base editing efficiency compared to an ABE7 base editor, e.g., ABE7.10.

[0829] In some embodiments, any of the ABE8 base editor variants described herein have at least 0.01%, at least 1%, at least 2%, at least 3%, at least 4%, at least 5%, at least 10%, at least 15%, at least 20%, at least 25%, at least 30%, at least 35%, at least 40%, at least 45%, at least 50%, at least 55%, at least 60%, at least 65%, at least 70%, at least 75%, at least 80%, at least 85%, at least 90%, at least 95%, or at least 99% on-target base editing efficiency. In some embodiments, any of the ABE8 base editor variants described herein have on-target base editing efficiency of at least 0.01%, at least 1%, at least 2%, at least 3%, at least 4%, at least 5%, at least 10%, at least 15%, at least 20%, at least 25%, at least 30%, at least 35%, at least 40%, at least 45%, at least 50%, at least 55%, at least 60%, at least 65%, at least 70%, at least 75%, at least 80%, at least 85%, at least 90%, at least 95%, or at least 99% as measured by edited target nucleobases in a population of cells.

[0830] In some embodiments, any of the ABE8 base editor variants described herein has higher on-target base editing efficiency compared to the ABE7 base editors. In some embodiments, any of the ABE8 base editor variants described herein have at least 1%, at least 2%, at least 3%, at least 4%, at least 5%, at least 10%, at least 15%, at least 20%, at least 25%, at least 30%, at least 35%, at least 40%, at least 45%, at least 50%, at least 55%, at least 60%, at least 65%, at least 70%, at least 75%, at least 80%, at least 85%, at least 90%, at least 95%, at least 99%, at least 100%, at least 105%, at least 110%, at least 115%, at least 120%, at least 125%, at least 130%, at least 135%, at least 140%, at least 145%, at least 150%, at least 155%, at least 160%, at least 165%, at least 170%, at least 175%, at least 180%, at least 185%, at least 190%, at least 195%, at least 200%, at least 210%, at least 220%, at least 230%, at least 240%, at least 250%, at least 260%, at least 270%, at least 280%, at least 290%, at least 300%, at least 310%, at least 320%, at least 330%, at least 340%, at least 350%, at least 360%, at least 370%, at least 380%, at least 390%, at least 400%, at least 450%, or at least 500% higher on-target base editing efficiency compared to an ABE7 base editor, e.g., ABE7.10.

[0831] In some embodiments, any of the ABE8 base editor variants described herein has at least 1.1 fold, at least 1.2 fold, at least 1.3 fold, at least 1.4 fold, at least 1.5 fold, at least 1.6 fold, at least 1.7 fold, at least 1.8 fold, at least 1.9 fold, at least 2.0 fold, at least 2.1 fold, at least 2.2 fold, at least 2.3 fold, at least 2.4 fold, at least 2.5 fold, at least 2.6 fold, at least 2.7 fold, at least 2.8 fold, at least 2.9 fold, at least 3.0 fold, at least 3.1 fold, at least 3.2 fold, at least 3.3 fold, at least 3.4 fold, at least 3.5 fold, at least 3.6 fold, at least 3.7 fold, at least 3.8 fold, at least 3.9 fold, at least 4.0 fold, at least 4.1 fold, at least 4.2 fold, at least 4.3 fold, at least 4.4 fold, at least 4.5 fold, at least 4.6 fold, at least 4.7 fold, at least 4.8 fold, at least 4.9 fold, or at least 5.0 fold higher on-target base editing efficiency compared to an ABE7 base editor, e.g., ABE7.10.

[0832] The ABE8 base editor variants described herein may be delivered to a host cell via a plasmid, a vector, a LNP complex, or an mRNA. In some embodiments, any of the ABE8 base editor variants described herein is delivered to a host cell as an mRNA. In some embodiments, an ABE8 base editor delivered via a nucleic acid based delivery system, e.g., an mRNA, has on-target editing efficiency of at least at least 1%, at least 2%, at least 3%, at least 4%, at least 5%, at least 10%, at least 15%, at least 20%, at least 25%, at least 30%, at least 35%, at least 40%, at least 45%, at least 50%, at least 55%, at least 60%, at least 65%, at least 70%, at least 75%, at least 80%, at least 85%, at least 90%, at least 95%, or at least 99% as measured by edited nucleobases. In some embodiments, an ABE8 base editor delivered by an mRNA system has higher base editing efficiency compared to an ABE8 base editor delivered by a plasmid or vector system. In some embodiments, any of the ABE8 base editor variants described herein has at least 1%, at least 2%, at least 3%, at least 4%, at least 5%, at least 10%, at least 15%, at least 20%, at least 25%, at least 30%, at least 35%, at least 40%, at least 45%, at least 50%, at least 55%, at least 60%, at least 65%, at least 70%, at least 75%, at least 80%, at least 85%, at least 90%, at least 95%, at least 99%, at least 100%, at least 105%, at least 110%, at least 115%, at least 120%, at least 125%, at least 130%, at least 135%, at least 140%, at least 145%, at least 150%, at least 155%, at least 160%, at least 165%, at least 170%, at least 175%, at least 180%, at least 185%, at least 190%, at least 195%, at least 200%, at least 210%, at least 220%, at least 230%, at least 240%, at least 250%, at least 260%, at least 270%, at least 280%, at least 290%, at least 300% higher, at least 310%, at least 320%, at least 330%, at least 340%, at least 350%, at least 360%, at least 370%, at least 380%, at least 390%, at least 400%, at least 450%, or at least 500% on-target editing efficiency when delivered by an mRNA system compared to when delivered by a plasmid or vector system. In some embodiments, any of the ABE8 base editor variants described herein has at least 1.1 fold, at least 1.2 fold, at least 1.3 fold, at least 1.4 fold, at least 1.5 fold, at least 1.6 fold, at least 1.7 fold, at least 1.8 fold, at least 1.9 fold, at least 2.0 fold, at least 2.1 fold, at least 2.2 fold, at least 2.3 fold, at least 2.4 fold, at least 2.5 fold, at least 2.6 fold, at least 2.7 fold, at least 2.8 fold, at least 2.9 fold, at least 3.0 fold, at least 3.1 fold, at least 3.2 fold, at least 3.3 fold, at least 3.4 fold, at least 3.5 fold, at least 3.6 fold, at least 3.7 fold, at least 3.8 fold, at least 3.9 fold, at least 4.0 fold, at least 4.1 fold, at least 4.2 fold, at least 4.3 fold, at least 4.4 fold, at least 4.5 fold, at least 4.6 fold, at least 4.7 fold, at least 4.8 fold, at least 4.9 fold, or at least 5.0 fold higher on-target editing efficiency when delivered by an mRNA system compared to when delivered by a plasmid or vector system.

[0833] In some embodiments, any of base editor systems comprising one of the ABE8 base editor variants described herein result in less than 50%, less than 40%, less than 30%, less than 20%, less than 19%, less than 18%, less than 17%, less than 16%, less than 15%, less than 14%, less than 13%, less than 12%, less than 11%, less than 10%, less than 9%, less than 8%, less than 7%, less than 6%, less than 5%, less than 4%, less than 3%, less than 2%, less than 1%, less than 0.9%, less than 0.8%, less than 0.7%, less than 0.6%, less than 0.5%, less than 0.4%, less than 0.3%, less than 0.2%, less than 0.1%, less than 0.09%, less than 0.08%, less than 0.07%, less than 0.06%, less than 0.05%, less than 0.04%, less than 0.03%, less than 0.02%, or less than 0.01% off-target editing in the target polynucleotide sequence.

[0834] In some embodiments, any of the ABE8 base editor variants described herein has lower guided off-target editing efficiency when delivered by an mRNA system compared to when delivered by a plasmid or vector system. In some embodiments, any of the ABE8 base editor variants described herein has at least 1%, at least 2%, at least 3%, at least 4%, at least 5%, at least 10%, at least 15%, at least 20%, at least 25%, at least 30%, at least 35%, at least 40%, at least 45%, at least 50%, at least 55%, at least 60%, at least 65%, at least 70%, at least 75%, at least 80%, at least 85%, at least 90%, at least 95%, or at least 99% lower guided off-target editing efficiency when delivered by an mRNA system compared to when delivered by a plasmid or vector system. In some embodiments, any of the ABE8 base editor variants described herein has at least 1.1 fold, at least 1.2 fold, at least 1.3 fold, at least 1.4 fold, at least 1.5 fold, at least 1.6 fold, at least 1.7 fold, at least 1.8 fold, at least 1.9 fold, at least 2.0 fold, at least 2.1 fold, at least 2.2 fold, at least 2.3 fold, at least 2.4 fold, at least 2.5 fold, at least 2.6 fold, at least 2.7 fold, at least 2.8 fold, at least 2.9 fold, or at least 3.0 fold lower guided off-target editing efficiency when delivered by an mRNA system compared to when delivered by a plasmid or vector system. In some embodiments, any of the ABE8 base editor variants described herein has at least about 2.2 fold decrease in guided off-target editing efficiency when delivered by an mRNA system compared to when delivered by a plasmid or vector system.

[0835] In some embodiments, any of the ABE8 base editor variants described herein has lower guide-independent off-target editing efficiency when delivered by an mRNA system compared to when delivered by a plasmid or vector system. In some embodiments, any of the ABE8 base editor variants described herein has at least 1%, at least 2%, at least 3%, at least 4%, at least 5%, at least 10%, at least 15%, at least 20%, at least 25%, at least 30%, at least 35%, at least 40%, at least 45%, at least 50%, at least 55%, at least 60%, at least 65%, at least 70%, at least 75%, at least 80%, at least 85%, at least 90%, at least 95%, or at least 99% lower guide-independent off-target editing efficiency when delivered by an mRNA system compared to when delivered by a plasmid or vector system. In some embodiments, any of the ABE8 base editor variants described herein has at least 1.1 fold, at least 1.2 fold, at least 1.3 fold, at least 1.4 fold, at least 1.5 fold, at least 1.6 fold, at least 1.7 fold, at least 1.8 fold, at least 1.9 fold, at least 2.0 fold, at least 2.1 fold, at least 2.2 fold, at least 2.3 fold, at least 2.4 fold, at least 2.5 fold, at least 2.6 fold, at least 2.7 fold, at least 2.8 fold, at least 2.9 fold, at least 3.0 fold, at least 5.0 fold, at least 10.0 fold, at least 20.0 fold, at least 50.0 fold, at least 70.0 fold, at least 100.0 fold, at least 120.0 fold, at least 130.0 fold, or at least 150.0 fold lower guide-independent off-target editing efficiency when delivered by an mRNA system compared to when delivered by a plasmid or vector system. In some embodiments, ABE8 base editor variants described herein has 134.0 fold decrease in guide-independent off-target editing efficiency (e.g., spurious RNA deamination) when delivered by an mRNA system compared to when delivered by a plasmid or vector system. In some embodiments, ABE8 base editor variants described herein does not increase guide-independent mutation rates across the genome.

[0836] In some embodiments, the base editors provided herein are capable of generating a ratio of intended mutations to indels that is greater than 1:1. In some embodiments, the base editors provided herein are capable of generating a ratio of intended mutations to indels that is at least 1.5:1, at least 2:1, at least 2.5:1, at least 3:1, at least 3.5:1, at least 4:1, at least 4.5:1, at least 5:1, at least 5.5:1, at least 6:1, at least 6.5:1, at least 7:1, at least 7.5:1, at least 8:1, at least 10:1, at least 12:1, at least 15:1, at least 20:1, at least 25:1, at least 30:1, at least 40:1, at least 50:1, at least 100:1, at least 200:1, at least 300:1, at least 400:1, at least 500:1, at least 600:1, at least 700:1, at least 800:1, at least 900:1, or at least 1000:1, or more.

[0837] The number of intended mutations and indels can be determined using any suitable method, for example, as described in International PCT Application Nos. PCT/2017/045381 (WO2018/027078) and PCT/US2016/058344 (WO2017/070632); Komor, A. C., et al., “Programmable editing of a target base in genomic DNA without double-stranded DNA cleavage” Nature 533, 420-424 (2016); Gaudelli, N. M., et al., “Programmable base editing of A⋅T to G⋅C in genomic DNA without DNA cleavage” Nature 551, 464-471 (2017); and Komor, A. C., et al., “Improved base excision repair inhibition and bacteriophage Mu Gam protein yields C:G-to-T:A base editors with higher efficiency and product purity” Science Advances 3:eaao4774 (2017); the entire contents of which are hereby incorporated by reference.

[0838] In some embodiments, to calculate indel frequencies, sequencing reads are scanned for exact matches to two 10-bp sequences that flank both sides of a window in which indels can occur. If no exact matches are located, the read is excluded from analysis. If the length of this indel window exactly matches the reference sequence the read is classified as not containing an indel. If the indel window is two or more bases longer or shorter than the reference sequence, then the sequencing read is classified as an insertion or deletion, respectively. In some embodiments, the base editors provided herein can limit formation of indels in a region of a nucleic acid. In some embodiments, the region is at a nucleotide targeted by a base editor or a region within 2, 3, 4, 5, 6, 7, 8, 9, or 10 nucleotides of a nucleotide targeted by a base editor.

[0839] The number of indels formed at a target nucleotide region can depend on the amount of time a nucleic acid (e.g., a nucleic acid within the genome of a cell) is exposed to a base editor. In some embodiments, the number or proportion of indels is determined after at least 1 hour, at least 2 hours, at least 6 hours, at least 12 hours, at least 24 hours, at least 36 hours, at least 48 hours, at least 3 days, at least 4 days, at least 5 days, at least 7 days, at least 10 days, or at least 14 days of exposing the target nucleotide sequence (e.g., a nucleic acid within the genome of a cell) to a base editor. It should be appreciated that the characteristics of the base editors as described herein can be applied to any of the fusion proteins, or methods of using the fusion proteins provided herein.

[0840] In some embodiments, the base editors provided herein are capable of limiting formation of indels in a region of a nucleic acid. In some embodiments, the region is at a nucleotide targeted by a base editor or a region within 2, 3, 4, 5, 6, 7, 8, 9, or 10 nucleotides of a nucleotide targeted by a base editor. In some embodiments, any of the base editors provided herein are capable of limiting the formation of indels at a region of a nucleic acid to less than 1%, less than 1.5%, less than 2%, less than 2.5%, less than 3%, less than 3.5%, less than 4%, less than 4.5%, less than 5%, less than 6%, less than 7%, less than 8%, less than 9%, less than 10%, less than 12%, less than 15%, or less than 20%. The number of indels formed at a nucleic acid region may depend on the amount of time a nucleic acid (e.g., a nucleic acid within the genome of a cell) is exposed to a base editor. In some embodiments, any number or proportion of indels is determined after at least 1 hour, at least 2 hours, at least 6 hours, at least 12 hours, at least 24 hours, at least 36 hours, at least 48 hours, at least 3 days, at least 4 days, at least 5 days, at least 7 days, at least 10 days, or at least 14 days of exposing a nucleic acid (e.g., a nucleic acid within the genome of a cell) to a base editor.

[0841] Some aspects of the disclosure are based on the recognition that any of the base editors provided herein are capable of efficiently generating an intended mutation in a nucleic acid (e.g., a nucleic acid within a genome of a subject) without generating a significant number of unintended mutations (e.g., spurious off-target editing or bystander editing). In some embodiments, an intended mutation is a mutation that is generated by a specific base editor bound to a gRNA, specifically designed to alter or correct a mutation in a target gene. In some embodiments, an intended mutation is a mutation that is generated by a specific base editor bound to a gRNA, specifically designed to alter or correct an HBG mutation. In some embodiments, any of the base editors provided herein are capable of generating a ratio of intended mutations to unintended mutations (e.g., intended mutations:unintended mutations) that is greater than 1:1. In some embodiments, any of the base editors provided herein are capable of generating a ratio of intended mutations to unintended mutations that is at least 1.5:1, at least 2:1, at least 2.5:1, at least 3:1, at least 3.5:1, at least 4:1, at least 4.5:1, at least 5:1, at least 5.5:1, at least 6:1, at least 6.5:1, at least 7:1, at least 7.5:1, at least 8:1, at least 10:1, at least 12:1, at least 15:1, at least 20:1, at least 25:1, at least 30:1, at least 40:1, at least 50:1, at least 100:1, at least 150:1, at least 200:1, at least 250:1, at least 500:1, or at least 1000:1, or more. It should be appreciated that the characteristics of the base editors described herein may be applied to any of the fusion proteins, or methods of using the fusion proteins provided herein.

### Multiplex Editing

[0842] In some embodiments, the base editor system provided herein is capable of multiplex editing of a plurality of nucleobase pairs in one or more genes. In some embodiments, the plurality of nucleobase pairs is located in the same gene. In some embodiments, the plurality of nucleobase pairs is located in one or more gene, wherein at least one gene is located in a different locus. In some embodiments, the multiplex editing can comprise one or more guide polynucleotides. In some embodiments, the multiplex editing can comprise one or more base editor system. In some embodiments, the multiplex editing can comprise one or more base editor systems with a single guide polynucleotide. In some embodiments, the multiplex editing can comprise one or more base editor system with a plurality of guide polynucleotides. In some embodiments, the multiplex editing can comprise one or more guide polynucleotide with a single base editor system. In some embodiments, the multiplex editing can comprise at least one guide polynucleotide that does not require a PAM sequence to target binding to a target polynucleotide sequence. In some embodiments, the multiplex editing can comprise at least one guide polynucleotide that requires a PAM sequence to target binding to a target polynucleotide sequence. In some embodiments, the multiplex editing can comprise a mix of at least one guide polynucleotide that does not require a PAM sequence to target binding to a target polynucleotide sequence and at least one guide polynucleotide that require a PAM sequence to target binding to a target polynucleotide sequence. It should be appreciated that the characteristics of the multiplex editing using any of the base editors as described herein can be applied to any of combination of the methods of using any of the base editor provided herein. It should also be appreciated that the multiplex editing using any of the base editors as described herein can comprise a sequential editing of a plurality of nucleobase pairs.

[0843] The methods provided herein comprise the steps of: (a) contacting a target nucleotide sequence of a polynucleotide of a subject (e.g., a double-stranded DNA sequence) with a base editor system comprising a nucleobase editor (e.g., an adenosine base editor, e.g., an ABE8 base editor, or a cytidine base editor) and a guide polynucleotide (e.g., gRNA), wherein the target nucleotide sequence comprises a targeted nucleobase pair; (b) inducing strand separation of a target region comprising the target nucleotide sequence; (c) editing a first nucleobase of the target nucleobase pair in a single strand of the target region to a second nucleobase; and (d) cutting no more than one strand of the target region, wherein a third nucleobase complementary to the first nucleobase base is replaced by a fourth nucleobase complementary to the second nucleobase.

[0844] In some embodiments, the plurality of nucleobase pairs are in one more genes. In some embodiments, the plurality of nucleobase pairs is in the same gene. In some embodiments, at least one gene in the one more genes is located in a different locus.

[0845] In some embodiments, the editing is editing of the plurality of nucleobase pairs in at least one protein coding region. In some embodiments, the editing is editing of the plurality of nucleobase pairs in at least one protein non-coding region. In some embodiments, the editing is editing of the plurality of nucleobase pairs in at least one protein coding region and at least one protein non-coding region.

[0846] In some embodiments, the editing is in conjunction with one or more guide polynucleotides. In some embodiments, the base editor system can comprise one or more base editor system. In some embodiments, the base editor system can comprise one or more base editor systems in conjunction with a single guide polynucleotide. In some embodiments, the base editor system can comprise one or more base editor system in conjunction with a plurality of guide polynucleotides. In some embodiments, the editing is in conjunction with one or more guide polynucleotide with a single base editor system. In some embodiments, the editing is in conjunction with at least one guide polynucleotide that does not require a PAM sequence to target binding to a target polynucleotide sequence. In some embodiments, the editing is in conjunction with at least one guide polynucleotide that require a PAM sequence to target binding to a target polynucleotide sequence. In some embodiments, the editing is in conjunction with a mix of at least one guide polynucleotide that does not require a PAM sequence to target binding to a target polynucleotide sequence and at least one guide polynucleotide that require a PAM sequence to target binding to a target polynucleotide sequence. It should be appreciated that the characteristics of the multiplex editing using any of the base editors as described herein can be applied to any of combination of the methods of using any of the base editors provided herein. It should also be appreciated that the editing can comprise a sequential editing of a plurality of nucleobase pairs.

[0847] In some embodiments, the base editor system capable of multiplex editing of a plurality of nucleobase pairs in one or more genes comprises one of the ABE8 base editor variants described herein. In some embodiments, the base editor system capable of multiplex editing of a plurality of nucleobase pairs in one or more genes comprises one of ABE7 base editors. In some embodiments, the base editor system capable of multiplex editing comprising one of the ABE8 base editor variants described herein has higher multiplex editing efficiency compared the base editor system capable of multiplex editing comprising one of ABE7 base editors. In some embodiments, the base editor system capable of multiplex editing comprising one of the ABE8 base editor variants described herein has at least 1%, at least 2%, at least 3%, at least 4%, at least 5%, at least 10%, at least 15%, at least 20%, at least 25%, at least 30%, at least 35%, at least 40%, at least 45%, at least 50%, at least 55%, at least 60%, at least 65%, at least 70%, at least 75%, at least 80%, at least 85%, at least 90%, at least 95%, at least 99%, at least 100%, at least 105%, at least 110%, at least 115%, at least 120%, at least 125%, at least 130%, at least 135%, at least 140%, at least 145%, at least 150%, at least 155%, at least 160%, at least 165%, at least 170%, at least 175%, at least 180%, at least 185%, at least 190%, at least 195%, at least 200%, at least 210%, at least 220%, at least 230%, at least 240%, at least 250%, at least 260%, at least 270%, at least 280%, at least 290%, at least 300% higher, at least 310%, at least 320%, at least 330%, at least 340%, at least 350%, at least 360%, at least 370%, at least 380%, at least 390%, at least 400%, at least 450%, or at least 500% higher multiplex editing efficiency compared the the base editor system capable of multiplex editing comprising one of ABE7 base editors. In some embodiments, the base editor system capable of multiplex editing comprising one of the ABE8 base editor variants described herein has at least 1.1 fold, at least 1.2 fold, at least 1.3 fold, at least 1.4 fold, at least 1.5 fold, at least 1.6 fold, at least 1.7 fold, at least 1.8 fold, at least 1.9 fold, at least 2.0 fold, at least 2.1 fold, at least 2.2 fold, at least 2.3 fold, at least 2.4 fold, at least 2.5 fold, at least 2.6 fold, at least 2.7 fold, at least 2.8 fold, at least 2.9 fold, at least 3.0 fold, at least 3.1 fold, at least 3.2 fold, at least 3.3 fold, at least 3.4 fold, at least 3.5 fold, at least 4.0 fold, at least 4.5 fold, at least 5.0 fold, at least 5.5 fold, or at least 6.0 fold higher multiplex editing efficiency compared the base editor system capable of multiplex editing comprising one of ABE7 base editors.

### Methods for Editing Nucleic Acids

[0848] Some aspects of the disclosure provide methods for editing a nucleic acid. In some embodiments, the method is a method for editing a nucleobase of a nucleic acid molecule encoding a protein (e.g., a base pair of a double-stranded DNA sequence). In some embodiments, the method comprises the steps of: a) contacting a target region of a nucleic acid (e.g., a double-stranded DNA sequence) with a complex comprising a base editor (e.g., a Cas9 domain fused to an adenosine deaminase) and a guide nucleic acid (e.g., gRNA), b) inducing strand separation of said target region, c) converting a first nucleobase of said target nucleobase pair in a single strand of the target region to a second nucleobase, and d) cutting no more than one strand of said target region using the nCas9, where a third nucleobase complementary to the first nucleobase base is replaced by a fourth nucleobase complementary to the second nucleobase. In some embodiments, the method results in less than 20% indel formation in the nucleic acid. It should be appreciated that in some embodiments, step b is omitted. In some embodiments, the method results in less than 19%, 18%, 16%, 14%, 12%, 10%, 8%, 6%, 4%, 2%, 1%, 0.5%, 0.2%, or less than 0.1% indel formation. In some embodiments, the method further comprises replacing the second nucleobase with a fifth nucleobase that is complementary to the fourth nucleobase, thereby generating an intended edited base pair (e.g., G⋅C to A⋅T). In some embodiments, at least 5% of the intended base pairs are edited. In some embodiments, at least 10%, 15%, 20%, 25%, 30%, 35%, 40%, 45%, or 50% of the intended base pairs are edited.

[0849] In some embodiments, the ratio of intended products to unintended products in the target nucleotide is at least 2:1, 5:1, 10:1, 20:1, 30:1, 40:1, 50:1, 60:1, 70:1, 80:1, 90:1, 100:1, or 200:1, or more. In some embodiments, the ratio of intended mutation to indel formation is greater than 1:1, 10:1, 50:1, 100:1, 500:1, or 1000:1, or more. In some embodiments, the cut single strand (nicked strand) is hybridized to the guide nucleic acid. In some embodiments, the cut single strand is opposite to the strand comprising the first nucleobase. In some embodiments, the base editor comprises a dCas9 domain. In some embodiments, the base editor protects or binds the non-edited strand. In some embodiments, the intended edited base pair is upstream of a PAM site. In some embodiments, the intended edited base pair is 1, 2, 3, 4, 5, 6, 7, 8, 9, 10, 11, 12, 13, 14, 15, 16, 17, 18, 19, or 20 nucleotides upstream of the PAM site. In some embodiments, the intended edited base pair is downstream of a PAM site. In some embodiments, the intended edited base pair is 1, 2, 3, 4, 5, 6, 7, 8, 9, 10, 11, 12, 13, 14, 15, 16, 17, 18, 19, or 20 nucleotides downstream stream of the PAM site. In some embodiments, the method does not require a canonical (e.g., NGG) PAM site. In some embodiments, the nucleobase editor comprises a linker. In some embodiments, the linker is 1-25 amino acids in length. In some embodiments, the linker is 5-20 amino acids in length. In some embodiments, linker is 10, 11, 12, 13, 14, 15, 16, 17, 18, 19, or 20 amino acids in length. In one embodiment, the linker is 32 amino acids in length. In another embodiment, a “long linker” is at least about 60 amino acids in length. In other embodiments, the linker is between about 3-100 amino acids in length. In some embodiments, the target region comprises a target window, wherein the target window comprises the target nucleobase pair. In some embodiments, the target window comprises 1-10 nucleotides. In some embodiments, the target window is 1-9, 1-8, 1-7, 1-6, 1-5, 1-4, 1-3, 1-2, or 1 nucleotides in length. In some embodiments, the target window is 1, 2, 3, 4, 5, 6, 7, 8, 9, 10, 11, 12, 13, 14, 15, 16, 17, 18, 19, or 20 nucleotides in length. In some embodiments, the intended edited base pair is within the target window. In some embodiments, the target window comprises the intended edited base pair. In some embodiments, the method is performed using any of the base editors provided herein. In some embodiments, a target window is a methylation window.

[0850] In some embodiments, the disclosure provides methods for editing a nucleotide (e.g., SNP in a gene encoding a protein). In some embodiments, the disclosure provides a method for editing a nucleobase pair of a double-stranded DNA sequence. In some embodiments, the method comprises a) contacting a target region of the double-stranded DNA sequence with a complex comprising a base editor and a guide nucleic acid (e.g., gRNA), where the target region comprises a target nucleobase pair, b) inducing strand separation of said target region, c) converting a first nucleobase of said target nucleobase pair in a single strand of the target region to a second nucleobase, d) cutting no more than one strand of said target region, wherein a third nucleobase complementary to the first nucleobase base is replaced by a fourth nucleobase complementary to the second nucleobase, and the second nucleobase is replaced with a fifth nucleobase that is complementary to the fourth nucleobase, thereby generating an intended edited base pair, wherein the efficiency of generating the intended edited base pair is at least 5%. It should be appreciated that in some embodiments, step b is omitted. In some embodiments, at least 5% of the intended base pairs are edited. In some embodiments, at least 10%, 15%, 20%, 25%, 30%, 35%, 40%, 45%, or 50% of the intended base pairs are edited. In some embodiments, the method causes less than 19%, 18%, 16%, 14%, 12%, 10⁰/a, 8%, 6%, 4%, 2%, 1%, 0.5%, 0.2%, or less than 0.1% indel formation. In some embodiments, the ratio of intended product to unintended products at the target nucleotide is at least 2:1, 5:1, 10:1, 20:1, 30:1, 40:1, 50:1, 60:1, 70:1, 80:1, 90:1, 100:1, or 200:1, or more. In some embodiments, the ratio of intended mutation to indel formation is greater than 1:1, 10:1, 50:1, 100:1, 500:1, or 1000:1, or more. In some embodiments, the cut single strand is hybridized to the guide nucleic acid. In some embodiments, the cut single strand is opposite to the strand comprising the first nucleobase. In some embodiments, the intended edited base pair is upstream of a PAM site. In some embodiments, the intended edited base pair is 1, 2, 3, 4, 5, 6, 7, 8, 9, 10, 11, 12, 13, 14, 15, 16, 17, 18, 19, or 20 nucleotides upstream of the PAM site. In some embodiments, the intended edited base pair is downstream of a PAM site. In some embodiments, the intended edited base pair is 1, 2, 3, 4, 5, 6, 7, 8, 9, 10, 11, 12, 13, 14, 15, 16, 17, 18, 19, or 20 nucleotides downstream stream of the PAM site. In some embodiments, the method does not require a canonical (e.g., NGG) PAM site. In some embodiments, the linker is 1-25 amino acids in length. In some embodiments, the linker is 5-20 amino acids in length. In some embodiments, the linker is 10, 11, 12, 13, 14, 15, 16, 17, 18, 19, or 20 amino acids in length. In some embodiments, the target region comprises a target window, wherein the target window comprises the target nucleobase pair. In some embodiments, the target window comprises 1-10 nucleotides. In some embodiments, the target window is 1-9, 1-8, 1-7, 1-6, 1-5, 1-4, 1-3, 1-2, or 1 nucleotides in length. In some embodiments, the target window is 1, 2, 3, 4, 5, 6, 7, 8, 9, 10, 11, 12, 13, 14, 15, 16, 17, 18, 19, or 20 nucleotides in length. In some embodiments, the intended edited base pair occurs within the target window. In some embodiments, the target window comprises the intended edited base pair. In some embodiments, the nucleobase editor is any one of the base editors provided herein.

### Expression of Fusion Proteins in a Host Cell

[0851] Fusion proteins of the invention comprising an adenosine deaminase variant may be expressed in virtually any host cell of interest, including but not limited to bacteria, yeast, fungi, insects, plants, and animal cells using routine methods known to the skilled artisan. For example, a DNA encoding an adenosine deaminase of the invention can be cloned by designing suitable primers for the upstream and downstream of CDS based on the cDNA sequence. The cloned DNA may be directly, or after digestion with a restriction enzyme when desired, or after addition of a suitable linker and/or a nuclear localization signal ligated with a DNA encoding one or more additional components of a base editing system. The base editing system is translated in a host cell to form a complex.

[0852] Fusion proteins are generated by operably linking one or more polynucleotides encoding one or more domains having nucleobase modifying activity (e.g., an adenosine deaminase) to a polynucleotide encoding a napDNAbp to prepare a polynucleotide that encodes a fusion protein of the invention. In some embodiments, a polynucleotide encoding a napDNAbp, and a DNA encoding a domain having nucleobase modifying activity may each be fused with a DNA encoding a binding domain or a binding partner thereof, or both DNAs may be fused with a DNA encoding a separation intein, whereby the nucleic acid sequence-recognizing conversion module and the nucleic acid base converting enzyme are translated in a host cell to form a complex. In these cases, a linker and/or a nuclear localization signal can be linked to a suitable position of one of or both DNAs when desired.

[0853] A DNA encoding a protein domain described herein can be obtained by chemically synthesizing the DNA, or by connecting synthesized partly overlapping oligoDNA short chains by utilizing the PCR method and the Gibson Assembly method to construct a DNA encoding the full length thereof. The advantage of constructing a full-length DNA by chemical synthesis or a combination of PCR method or Gibson Assembly method is that the codon to be used can be designed in CDS full-length according to the host into which the DNA is introduced. In the expression of a heterologous DNA, the protein expression level is expected to increase by converting the DNA sequence thereof to a codon highly frequently used in the host organism. As the data of codon use frequency in host to be used, for example, the genetic code use frequency database (http://www.kazusa.or.jp/codon/rndex.html) disclosed in the home page of Kazusa DNA Research Institute can be used, or documents showing the codon use frequency in each host may be referred to. By reference to the obtained data and the DNA sequence to be introduced, codons showing low use frequency in the host from among those used for the DNA sequence may be converted to a codon coding the same amino acid and showing high use frequency.

[0854] An expression vector containing a DNA encoding a nucleic acid sequence-recognizing module and/or a nucleic acid base converting enzyme can be produced, for example, by linking the DNA to the downstream of a promoter in a suitable expression vector.

[0855] As the expression vector, Escherichia coli-derived plasmids (e.g., pBR322, pBR325, pUC12, pUC13); Bacillus subtilis-derived plasmids (e.g., pUB110, pTP5, pC194); yeast-derived plasmids (e.g., pSH19, pSH15); insect cell expression plasmids (e.g., pFast-Bac); animal cell expression plasmids (e.g., pA1-11, pXT1, pRc/CMV, pRc/RSV, pcDNAI/Neo); bacteriophages such as .lamda.phage and the like; insect virus vectors such as baculovirus and the like (e.g., BmNPV, AcNPV); animal virus vectors such as retrovirus, vaccinia virus, adenovirus and the like, and the like are used.

[0856] As the promoter, any promoter appropriate for a host to be used for gene expression can be used. In a conventional method using DSB, since the survival rate of the host cell sometimes decreases markedly due to the toxicity, it is desirable to increase the number of cells by the start of the induction by using an inductive promoter. However, since sufficient cell proliferation can also be afforded by expressing the nucleic acid-modifying enzyme complex of the present invention, a constitution promoter can also be used without limitation.

[0857] For example, when the host is an animal cell, SR.alpha. promoter, SV40 promoter, LTR promoter, CMV (cytomegalovirus) promoter, RSV (Rous sarcoma virus) promoter, MoMuLV (Moloney mouse leukemia virus) LTR, HSV-TK (simple herpes virus thymidine kinase) promoter and the like are used. Of these, CMV promoter, SR.alpha. promoter and the like are preferable. When the host is Escherichia coli, trp promoter, lac promoter, recA promoter, lamda.P.sub.L promoter, lpp promoter, T7 promoter and the like are preferable. When the host is genus Bacillus, SPO1 promoter, SPO2 promoter, penP promoter and the like are preferable. When the host is a yeast, Gal1/10 promoter, PHO5 promoter, PGK promoter, GAP promoter, ADH promoter and the like are preferable. When the host is an insect cell, polyhedrin promoter, P10 promoter and the like are preferable. When the host is a plant cell, CaMV35S promoter, CaMV19S promoter, NOS promoter and the like are preferable.

[0858] In some embodiments, the expression vector may contain an enhancer, splicing signal, terminator, polyA addition signal, a selection marker such as drug resistance gene, auxotrophic complementary gene and the like, replication origin and the like on demand.

[0859] An RNA encoding a protein domain described herein can be prepared by, for example, transcription to mRNA in a vitro transcription system known per se by using a vector encoding DNA encoding the above-mentioned nucleic acid sequence-recognizing module and/or a nucleic acid base converting enzyme as a template.

[0860] A fusion protein of the invention can be intracellularly expressed by introducing an expression vector containing a DNA encoding a nucleic acid sequence-recognizing module and/or a nucleic acid base converting enzyme into a host cell, and culturing the host cell.

[0861] Host cells useful in the invention include bacterial cells, yeast, insect cells, animal cells and the like.

[0862] The genus Escherichia includes Escherichia coli K12.cndot.DH1 (Proc. Natl. Acad. Sci. USA, 60, 160 (1968)), Escherichia coli JM103 (Nucleic Acids Research, 9, 309 (1981)), Escherichia coli JA221 (Journal of Molecular Biology, 120, 517 (1978)), Escherichia coli HB101 (Journal of Molecular Biology, 41, 459 (1969)), Escherichia coli C600 (Genetics, 39, 440 (1954)) and the like.

[0863] The genus Bacillus includes Bacillus subtilis M1114 (Gene, 24, 255 (1983)), Bacillus subtilis 207-21 (Journal of Biochemistry, 95, 87 (1984)) and the like.

[0864] Yeast useful for expression the fusion protein of the present invention include, Saccharomyces cerevisiae AH22, AH22R.sup.-, NA87-11A, DKD-5D, 20B-12, Schizosaccharomyces pombe NCYC1913, NCYC2036, Pichia pastoris KM71 and the like.

[0865] Fusion proteins are expressed in insect cells using, for example, viral vectors, such as AcNPV. Insect host cells include any of the following cell lines: cabbage armyworm larva-derived established line (Spodoptera frugiperda cell; Sf cell), MG1 cells derived from the mid-intestine of Trichoplusia ni, High Five™ cells derived from an egg of Trichoplusia ni, Mamestra brassicae-derived cells, Estigmena acrea-derived cells and the like are used. When the virus is BmNPV, cells of Bombyx mori-derived established line (Bombyx mori N cell; BmN cell) and the like are used as insect cells. As the Sf cell, for example, Sf9 cell (ATCC CRL1711), Sf21 cell (all above, In Vivo, 13, 213-217 (1977)) and the like.

[0866] As the insect, for example, larva of Bombyx mori, Drosophila, cricket and the like are used to express fusion proteins of the invention (Nature, 315, 592 (1985)).

[0867] Mammalian cell lines may be used to express fusion proteins. Such cell lines include monkey COS-7 cell, monkey Vero cell, Chinese hamster ovary (CHO) cell, dhfr gene-deficient CHO cell, mouse L cell, mouse AtT-20 cell, mouse myeloma cell, rat GH3 cell, human FL cell and the like, pluripotent stem cells such as iPS cell, ES cell and the like of human and other mammals, and primary cultured cells prepared from various tissues. Furthermore, zebrafish embryo, Xenopus oocyte and the like can also be used.

[0868] Plant cells may be maintained in culture using methods well known to the skilled artisan. Plant cell culture involves suspending cultured cells, callus, protoplast, leaf segment, root segment and the like prepared from various plants (e.g., grain such as rice, wheat, corn and the like, product crops such as tomato, cucumber, eggplant, carnations, Eustoma russelliamum, tobacco, Arabidopsis thaliana).

[0869] All the above-mentioned host cells may be haploid (monoploid), or polyploid (e.g., diploid, triploid, tetraploid and the like). In the conventional mutation introduction methods, mutation is, in principle, introduced into only one homologous chromosome to produce a hetero gene type. Therefore, desired phenotype is not expressed unless dominant mutation occurs, and homozygousness inconveniently requires labor and time. In contrast, according to the present invention, since mutation can be introduced into any allele on the homologous chromosome in the genome, desired phenotype can be expressed in a single generation even in the case of recessive mutation, which is extremely useful since the problem of the conventional method can be solved.

[0870] Expression vectors encoding a fusion protein of the invention are introduced into host cells using any transfection method (e.g., lysozyme method, competent method, PEG method, CaCl₂) coprecipitation method, electroporation method, the microinjection method, the particle gun method, lipofection method, Agrobacterium method). The transfection method is selected based on the host cell to be transfected.

[0871] Escherichia coli can be transformed according to the methods described in, for example, Proc. Natl. Acad. Sci. USA, 69, 2110 (1972), Gene, 17, 107 (1982) and the like.

[0872] The genus Bacillus can be introduced into a vector according to the methods described in, for example, Molecular & General Genetics, 168, 111 (1979) and the like.

[0873] Yeast cells can be introduced into a vector according to the methods described in, for example, Methods in Enzymology, 194, 182-187 (1991), Proc. Natl. Acad. Sci. USA, 75, 1929 (1978) and the like.

[0874] Insect cells can be introduced into a vector according to the methods described in, for example, Bio/Technology, 6, 47-55 (1988) and the like.

[0875] Mammalian cells can be introduced into a vector according to the methods described in, for example, Cell Engineering additional volume 8, New Cell Engineering Experiment Protocol, 263-267 (1995) (published by Shujunsha), and Virology, 52, 456 (1973).

[0876] Cells comprising expression vectors of the invention are cultured according to known methods, which vary depending on the host.

[0877] For example, when Escherichia coli or genus Bacillus are cultured, a liquid medium is preferable as a medium to be used for the culture. The medium preferably contains a carbon source, nitrogen source, inorganic substance and the like necessary for the growth of the transformant. Examples of the carbon source include glucose, dextrin, soluble starch, sucrose and the like; examples of the nitrogen source include inorganic or organic substances such as ammonium salts, nitrate salts, corn steep liquor, peptone, casein, meat extract, soybean cake, potato extract and the like; and examples of the inorganic substance include calcium chloride, sodium dihydrogen phosphate, magnesium chloride and the like. The medium may contain yeast extract, vitamins, growth promoting factor and the like. The pH of the medium is preferably about 5-about 8.

[0878] As a medium for culturing Escherichia coli, for example, M9 medium containing glucose, casamino acid (Journal of Experiments in Molecular Genetics, 431-433, Cold Spring Harbor Laboratory, New York 1972) is preferable. Where necessary, for example, agents such as 3.beta.-indolylacrylic acid may be added to the medium to ensure an efficient function of a promoter. Escherichia coli is cultured at generally about 15-about 43° C. Where necessary, aeration and stirring may be performed.

[0879] The genus Bacillus is cultured at generally about 30-about 40° C. Where necessary, aeration and stirring may be performed.

[0880] Examples of the medium for culturing yeast include Burkholder minimum medium (Proc. Natl. Acad. Sci. USA, 77, 4505 (1980)), SD medium containing 0.5% casamino acid (Proc. Natl. Acad. Sci. USA, 81, 5330 (1984)) and the like. The pH of the medium is preferably about 5-about 8. The culture is performed at generally about 20° C.-about 35° C. Where necessary, aeration and stirring may be performed.

[0881] As a medium for culturing an insect cell or insect, for example, Grace's Insect Medium (Nature, 195, 788 (1962)) containing an additive such as inactivated 10% bovine serum and the like as appropriate and the like are used. The pH of the medium is preferably about 6.2 to about 6.4. The culture is performed at generally about 27° C. Where necessary, aeration and stirring may be performed.

[0882] As a medium for culturing an animal cell, for example, minimum essential medium (MEM) containing about 5-about 20% of fetal bovine serum (Science, 122, 501 (1952)), Dulbecco's modified Eagle medium (DMEM) (Virology, 8, 396 (1959)), RPMI 1640 medium (The Journal of the American Medical Association, 199, 519 (1967)), 199 medium (Proceeding of the Society for the Biological Medicine, 73, 1 (1950)) and the like are used. The pH of the medium is preferably about 6-about 8. The culture is performed at generally about 30° C.-about 40° C. Where necessary, aeration and stirring may be performed.

[0883] As a medium for culturing a plant cell, for example, MS medium, LS medium, B5 medium and the like are used. The pH of the medium is preferably about 5-about 8. The culture is performed at generally about 20° C.-about 30° C. Where necessary, aeration and stirring may be performed.

[0884] When a higher eukaryotic cell, such as animal cell, insect cell, plant cell and the like is used as a host cell, a DNA encoding a base editing system of the present invention (e.g., comprising an adenosine deaminase variant) is introduced into a host cell under the regulation of an inducible promoter (e.g., metallothionein promoter (induced by heavy metal ion), heat shock protein promoter (induced by heat shock), Tet-ON/Tet-OFF system promoter (induced by addition or removal of tetracycline or a derivative thereof), steroid-responsive promoter (induced by steroid hormone or a derivative thereof) etc.), the induction substance is added to the medium (or removed from the medium) at an appropriate stage to induce expression of the nucleic acid-modifying enzyme complex, culture is performed for a given period to carry out a base editing and, introduction of a mutation into a target gene, transient expression of the base editing system can be realized.

[0885] Prokaryotic cells such as Escherichia coli and the like can utilize an inducible promoter. Examples of the inducible promoter include, but are not limited to, lac promoter (induced by IPTG), cspA promoter (induced by cold shock), araBAD promoter (induced by arabinose) and the like.

[0886] Alternatively, the above-mentioned inductive promoter can also be utilized as a vector removal mechanism when higher eukaryotic cells, such as animal cell, insect cell, plant cell and the like are used as a host cell. That is, a vector is mounted with a replication origin that functions in a host cell, and a nucleic acid encoding a protein necessary for replication (e.g., SV40 on and large T antigen, oriP and EBNA-1 etc. for animal cells), of the expression of the nucleic acid encoding the protein is regulated by the above-mentioned inducible promoter. As a result, while the vector is autonomously replicatable in the presence of an induction substance, when the induction substance is removed, autonomous replication is not available, and the vector naturally falls off along with cell division (autonomous replication is not possible by the addition of tetracycline and doxycycline in Tet-OFF system vector).

### Delivery System

[0887] Nucleic Acid-Based Delivery of a Nucleobase Editors and gRNAs

[0888] Nucleic acids encoding base editing systems according to the present disclosure can be administered to subjects or delivered into cells in vitro or in vivo by art-known methods or as described herein. In one embodiment, nucleobase editors can be delivered by, e.g., vectors (e.g., viral or non-viral vectors), non-vector based methods (e.g., using naked DNA, DNA complexes, mRNA, lipid nanoparticles), or a combination thereof.

[0889] Nucleic acids encoding nucleobase editors can be delivered directly to cells (e.g., hematopoietic cells or their progenitors, hematopoietic stem cells, and/or induced pluripotent stem cells) as naked DNA or RNA, e.g., mRNA, for instance by means of transfection or electroporation, or can be conjugated to molecules (e.g., N-acetylgalactosamine) promoting uptake by the target cells. Nucleic acid vectors, such as the vectors described herein can also be used.

[0890] Nucleic acid vectors can comprise one or more sequences encoding a domain of a fusion protein described herein. A vector can also comprise a sequence encoding a signal peptide (e.g., for nuclear localization, nucleolar localization, or mitochondrial localization), associated with (e.g., inserted into or fused to) a sequence coding for a protein. As one example, a nucleic acid vectors can include a Cas9 coding sequence that includes one or more nuclear localization sequences (e.g., a nuclear localization sequence from SV40), and an adenosine deaminase variant (e.g., ABE8).

[0891] The nucleic acid vector can also include any suitable number of regulatory/control elements, e.g., promoters, enhancers, introns, polyadenylation signals, Kozak consensus sequences, or internal ribosome entry sites (IRES). These elements are well known in the art. For hematopoietic cells suitable promoters can include IFNbeta or CD45.

[0892] Nucleic acid vectors according to this disclosure include recombinant viral vectors. Exemplary viral vectors are set forth herein. Other viral vectors known in the art can also be used. In addition, viral particles can be used to deliver base editing system components in nucleic acid and/or peptide form. For example, “empty” viral particles can be assembled to contain any suitable cargo. Viral vectors and viral particles can also be engineered to incorporate targeting ligands to alter target tissue specificity.

[0893] In addition to viral vectors, non-viral vectors can be used to deliver nucleic acids encoding genome editing systems according to the present disclosure. One important category of non-viral nucleic acid vectors are nanoparticles, which can be organic or inorganic. Nanoparticles are well known in the art. Any suitable nanoparticle design can be used to deliver genome editing system components or nucleic acids encoding such components. For instance, organic (e.g. lipid and/or polymer) nanoparticles can be suitable for use as delivery vehicles in certain embodiments of this disclosure. Exemplary lipids for use in nanoparticle formulations, and/or gene transfer are shown in Table 10 (below).

TABLE 10
Lipids Used for Gene Transfer

| Lipid | Abbreviation | Feature |
|---|---|---|
| 1,2-Dioleoyl-sn-glycero-3-phosphatidylcholine | DOPC | Helper |
| 1,2-Dioleoyl-sn-glycero-3- | DOPE | Helper |
| phosphatidylethanolamine | | |
| Cholesterol | | Helper |
| N-[1-(2,3-Dioleyloxy)prophyl]N,N,N- | DOTMA | Cat- |
| trimethylammonium chloride | | ionic |
| 1,2-Dioleoyloxy-3-trimethylammonium-propane | DOTAP | Cat- |
| | | ionic |
| Dioctadecylamidoglycylspermine | DOGS | Cat- |
| | | ionic |
| N-(3-Aminopropyl)-N,N-dimethyl- | GAP-DLRIE | Cat- |
| 2,3-bis(dodecyloxy)-1-propanaminium bromide | | ionic |
| Cetyltrimethylammonium bromide | CTAB | Cat- |
| | | ionic |
| 6-Lauroxyhexyl ornithinate | LHON | Cat- |
| | | ionic |
| 1-(2,3-Dioleoyloxypropyl)-2,4,6- | 2Oc | Cat- |
| trimethylpyridinium | | ionic |
| 2,3-Dioleyloxy-N-[2(sperminecarboxamido- | DOSPA | Cat- |
| ethyl]-N,N-dimethyl-1-propanaminium | | ionic |
| trifluoroacetate | | |
| 1,2-Dioleyl-3-trimethylammonium-propane | DOPA | Cat- |
| | | ionic |
| N-(2-Hydroxyethyl)-N,N-dimethyl- | MDRIE | Cat- |
| 2,3-bis(tetradecyloxy)-1-propanaminium bromide | | ionic |
| Dimyristooxypropyl dimethyl hydroxyethyl | DMRI | Cat- |
| ammonium bromide | | ionic |
| 3β-[N-(N′,N′-Dimethylaminoethane)-carbamoyl] | DC-Chol | Cat- |
| cholesterol | | ionic |
| Bis-guanidium-tren-cholesterol | BGTC | Cat- |
| | | ionic |
| 1,3-Diodeoxy-2-(6-carboxy-spermyl)-propylamide | DOSPER | Cat- |
| | | ionic |
| Dimethyloctadecylammonium bromide | DDAB | Cat- |
| | | ionic |
| Dioctadecylamidoglicylspermidin | DSL | Cat- |
| | | ionic |
| rac-[(2,3-Dioctadecyloxypropyl)(2-hydroxyethyl)]- | CLIP-1 | Cat- |
| dimethylammonium chloride | | ionic |
| rac-[2(2,3-Dihexadecyloxypropyl- | CLIP-6 | Cat- |
| oxymethyloxy)ethyl]trimethylammonium bromide | | ionic |
| Ethyldimyristoylphosphatidylcholine | EDMPC | Cat- |
| | | ionic |
| 1,2-Distearyloxy-N,N-dimethyl-3-aminopropane | DSDMA | Cat- |
| | | ionic |
| 1,2-Dimyristoyl-trimethylammonium propane | DMTAP | Cat- |
| | | ionic |
| O,O′-Dimyristyl-N-lysyl aspartate | DMKE | Cat- |
| | | ionic |
| 1,2-Distearoyl-sn-glycero-3-ethylpho sphocholine | DSEPC | Cat- |
| | | ionic |
| N-Palmitoyl D-erythro-sphingosyl | CCS | Cat- |
| carbamoyl-spermine | | ionic |
| N-t-Butyl-N0-tetradecyl-3- | diC14-amidine | Cat- |
| tetradecylaminopropionamidine | | ionic |
| Octadecenolyoxy[ethyl-2-heptadecenyl-3 | DOTIM | Cat- |
| hydroxyethyl]imidazolinium chloride | | ionic |
| N1-Cholesteryloxycarbonyl- | CDAN | Cat- |
| 3,7-diazanonane-1,9-diamine | | ionic |
| 2-(3-[Bis(3-amino-propyl)- | RPR209120 | Cat- |
| amino]propylamino)-N- | | ionic |
| ditetradecylcarbamoylme-ethyl-acetamide | | |
| 1,2-dilinoleyloxy-3-dimethylaminopropane | DLinDMA | Cat- |
| | | ionic |
| 2,2-dilinoleyl-4-dimethylaminoethyl- | DLin-KC2- | Cat- |
| [1,3]-dioxolane | DMA | ionic |
| dilinoleyl-methyl-4-dimethylaminobutyrate | DLin-MC3- | Cat- |
| | DMA | ionic |

[0894] Table 11 lists exemplary polymers for use in gene transfer and/or nanoparticle formulations.

TABLE 11
Polymers Used for Gene Transfer

| Polymer | Abbreviation |
|---|---|
| Poly(ethylene)glycol | PEG |
| Polyethylenimine | PEI |
| Dithiobis (succinimidylpropionate) | DSP |
| Dimethyl-3,3′-dithiobispropionimidate | DTBP |
| Poly(ethylene imine)biscarbamate | PEIC |
| Poly(L-lysine) | PLL |
| Histidine modified PLL | |
| Poly(N-vinylpyrrolidone) | PVP |
| Poly(propylenimine) | PPI |
| Poly(amidoamine) | PAMAM |
| Poly(amidoethylenimine) | SS-PAEI |
| Triethylenetetramine | TETA |
| Poly(β-aminoester) | |
| Poly(4-hydroxy-L-proline ester) | PHP |
| Poly(allylamine) | |
| Poly(α-[4-aminobutyl]-L-glycolic acid) | PAGA |
| Poly(D,L-lactic-co-glycolic acid) | PLGA |
| Poly(N-ethyl-4-vinylpyridinium bromide) | |
| Poly(phosphazene)s | PPZ |
| Poly(phosphoester)s | PPE |
| Poly(phosphoramidate)s | PPA |
| Poly(N-2-hydroxypropylmethacrylamide) | pHPMA |
| Poly (2-(dimethylamino)ethyl methacrylate) | pDMAEMA |
| Poly(2-aminoethyl propylene phosphate) | PPE-EA |
| Chitosan | |
| Galactosylated chitosan | |
| N-Dodacylated chitosan | |
| Histone | |
| Collagen | |
| Dextran-spermine | D-SPM |

[0895] Table 12 summarizes delivery methods for a polynucleotide encoding a fusion protein described herein.

TABLE 12

| | | Delivery into | | | Type of |
|---|---|---|---|---|---|
| | | Non-Dividing | Duration of | Genome | Molecule |
| Delivery | Vector/Mode | Cells | Expression | Integration | Delivered |
| Physical | (e.g., | YES | Transient | NO | Nucleic Acids |
| | electroporation, | | | | and Proteins |
| | particle gun, | | | | |
| | Calcium | | | | |
| | Phosphate | | | | |
| | transfection | | | | |
| Viral | Retrovirus | NO | Stable | YES | RNA |
| | Lentivirus | YES | Stable | YES/NO with | RNA |
| | | | | modification | |
| | Adenovirus | YES | Transient | NO | DNA |
| | Adeno- | YES | Stable | NO | DNA |
| | Associated | | | | |
| | Virus (AAV) | | | | |
| | Vaccinia Virus | YES | Very | NO | DNA |
| | | | Transient | | |
| | Herpes Simplex | YES | Stable | NO | DNA |
| | Virus | | | | |
| Non-Viral | Cationic | YES | Transient | Depends on | Nucleic Acids |
| | Liposomes | | | what is | and Proteins |
| | | | | delivered | |
| | Polymeric | YES | Transient | Depends on | Nucleic Acids |
| | Nanoparticles | | | what is | and Proteins |
| | | | | delivered | |
| Biological | Attenuated | YES | Transient | NO | Nucleic Acids |
| Non-Viral | Bacteria | | | | |
| Delivery | Engineered | YES | Transient | NO | Nucleic Acids |
| Vehicles | Bacteriophages | | | | |
| | Mammalian | YES | Transient | NO | Nucleic Acids |
| | Virus-like | | | | |
| | Particles | | | | |
| | Biological | YES | Transient | NO | Nucleic Acids |
| | liposomes: | | | | |
| | Erythrocyte | | | | |
| | Ghosts and | | | | |
| | Exosomes | | | | |

[0896] In another aspect, the delivery of genome editing system components or nucleic acids encoding such components, for example, a nucleic acid binding protein such as, for example, Cas9 or variants thereof, and a gRNA targeting a genomic nucleic acid sequence of interest, may be accomplished by delivering a ribonucleoprotein (RNP) to cells. The RNP comprises the nucleic acid binding protein, e.g., Cas9, in complex with the targeting gRNA. RNPs may be delivered to cells using known methods, such as electroporation, nucleofection, or cationic lipid-mediated methods, for example, as reported by Zuris, J. A. et al., 2015, Nat. Biotechnology, 33(1):73-80. RNPs are advantageous for use in CRISPR base editing systems, particularly for cells that are difficult to transfect, such as primary cells. In addition, RNPs can also alleviate difficulties that may occur with protein expression in cells, especially when eukaryotic promoters, e.g., CMV or EF1A, which may be used in CRISPR plasmids, are not well-expressed. Advantageously, the use of RNPs does not require the delivery of foreign DNA into cells. Moreover, because an RNP comprising a nucleic acid binding protein and gRNA complex is degraded over time, the use of RNPs has the potential to limit off-target effects. In a manner similar to that for plasmid based techniques, RNPs can be used to deliver binding protein (e.g., Cas9 variants) and to direct homology directed repair (HDR).

[0897] A promoter used to drive base editor coding nucleic acid molecule expression can include AAV ITR. This can be advantageous for eliminating the need for an additional promoter element, which can take up space in the vector. The additional space freed up can be used to drive the expression of additional elements, such as a guide nucleic acid or a selectable marker. ITR activity is relatively weak, so it can be used to reduce potential toxicity due to over expression of the chosen nuclease.

[0898] Any suitable promoter can be used to drive expression of the base editor and, where appropriate, the guide nucleic acid. For ubiquitous expression, promoters that can be used include CMV, CAG, CBh, PGK, SV40, Ferritin heavy or light chains, etc. For brain or other CNS cell expression, suitable promoters can include: SynapsinI for all neurons, CaMKIIalpha for excitatory neurons, GAD67 or GAD65 or VGAT for GABAergic neurons, etc. For liver cell expression, suitable promoters include the Albumin promoter. For lung cell expression, suitable promoters can include SP-B. For endothelial cells, suitable promoters can include ICAM. For hematopoietic cells suitable promoters can include IFNbeta or CD45. For Osteoblasts suitable promoters can include OG-2.

[0899] In some embodiments, a base editor of the present disclosure is of small enough size to allow separate promoters to drive expression of the base editor and a compatible guide nucleic acid within the same nucleic acid molecule. For instance, a vector or viral vector can comprise a first promoter operably linked to a nucleic acid encoding the base editor and a second promoter operably linked to the guide nucleic acid.

[0900] The promoter used to drive expression of a guide nucleic acid can include: Pol III promoters such as U6 or H1 Use of Pol II promoter and intronic cassettes to express gRNA Adeno Associated Virus (AAV).

### Viral Vectors

[0901] A base editor described herein can therefore be delivered with viral vectors. In some embodiments, a base editor disclosed herein can be encoded on a nucleic acid that is contained in a viral vector. In some embodiments, one or more components of the base editor system can be encoded on one or more viral vectors. For example, a base editor and guide nucleic acid can be encoded on a single viral vector. In other embodiments, the base editor and guide nucleic acid are encoded on different viral vectors. In either case, the base editor and guide nucleic acid can each be operably linked to a promoter and terminator. The combination of components encoded on a viral vector can be determined by the cargo size constraints of the chosen viral vector.

[0902] The use of RNA or DNA viral based systems for the delivery of a base editor takes advantage of highly evolved processes for targeting a virus to specific cells in culture or in the host and trafficking the viral payload to the nucleus or host cell genome. Viral vectors can be administered directly to cells in culture, patients (in vivo), or they can be used to treat cells in vitro, and the modified cells can optionally be administered to patients (ex vivo). Conventional viral based systems could include retroviral, lentivirus, adenoviral, adeno-associated and herpes simplex virus vectors for gene transfer. Integration in the host genome is possible with the retrovirus, lentivirus, and adeno-associated virus gene transfer methods, often resulting in long term expression of the inserted transgene. Additionally, high transduction efficiencies have been observed in many different cell types and target tissues.

[0903] Viral vectors can include lentivirus (e.g., HIV and FIV-based vectors), Adenovirus (e.g., AD100), Retrovirus (e.g., Maloney murine leukemia virus, MML-V), herpesvirus vectors (e.g., HSV-2), and Adeno-associated viruses (AAVs), or other plasmid or viral vector types, in particular, using formulations and doses from, for example, U.S. Pat. No. 8,454,972 (formulations, doses for adenovirus), U.S. Pat. No. 8,404,658 (formulations, doses for AAV) and U.S. Pat. No. 5,846,946 (formulations, doses for DNA plasmids) and from clinical trials and publications regarding the clinical trials involving lentivirus, AAV and adenovirus. For example, for AAV, the route of administration, formulation and dose can be as in U.S. Pat. No. 8,454,972 and as in clinical trials involving AAV. For Adenovirus, the route of administration, formulation and dose can be as in U.S. Pat. No. 8,404,658 and as in clinical trials involving adenovirus. For plasmid delivery, the route of administration, formulation and dose can be as in U.S. Pat. No. 5,846,946 and as in clinical studies involving plasmids. Doses can be based on or extrapolated to an average 70 kg individual (e.g. a male adult human), and can be adjusted for patients, subjects, mammals of different weight and species. Frequency of administration is within the ambit of the medical or veterinary practitioner (e.g., physician, veterinarian), depending on usual factors including the age, sex, general health, other conditions of the patient or subject and the particular condition or symptoms being addressed. The viral vectors can be injected into the tissue of interest. For cell-type specific base editing, the expression of the base editor and optional guide nucleic acid can be driven by a cell-type specific promoter.

[0904] The tropism of a retrovirus can be altered by incorporating foreign envelope proteins, expanding the potential target population of target cells. Lentiviral vectors are retroviral vectors that are able to transduce or infect non-dividing cells and typically produce high viral titers. Selection of a retroviral gene transfer system would therefore depend on the target tissue. Retroviral vectors are comprised of cis-acting long terminal repeats with packaging capacity for up to 6-10 kb of foreign sequence. The minimum cis-acting LTRs are sufficient for replication and packaging of the vectors, which are then used to integrate the therapeutic gene into the target cell to provide permanent transgene expression. Widely used retroviral vectors include those based upon murine leukemia virus (MuLV), gibbon ape leukemia virus (GaLV), Simian Immuno deficiency virus (SIV), human immuno deficiency virus (HIV), and combinations thereof (See, e.g., Buchscher et al., J. Virol. 66:2731-2739 (1992); Johann et al., J. Virol. 66:1635-1640 (1992); Sommnerfelt et al., Virol. 176:58-59 (1990); Wilson et al., J. Virol. 63:2374-2378 (1989); Miller et al., J. Virol. 65:2220-2224 (1991); PCT/US94/05700).

[0905] Retroviral vectors, especially lentiviral vectors, can require polynucleotide sequences smaller than a given length for efficient integration into a target cell. For example, retroviral vectors of length greater than 9 kb can result in low viral titers compared with those of smaller size. In some aspects, a base editor of the present disclosure is of sufficient size so as to enable efficient packaging and delivery into a target cell via a retroviral vector. In some embodiments, a base editor is of a size so as to allow efficient packing and delivery even when expressed together with a guide nucleic acid and/or other components of a targetable nuclease system.

[0906] In applications where transient expression is preferred, adenoviral based systems can be used. Adenoviral based vectors are capable of very high transduction efficiency in many cell types and do not require cell division. With such vectors, high titer and levels of expression have been obtained. This vector can be produced in large quantities in a relatively simple system. Adeno-associated virus (“AAV”) vectors can also be used to transduce cells with target nucleic acids, e.g., in the in vitro production of nucleic acids and peptides, and for in vivo and ex vivo gene therapy procedures (See, e.g., West et al., Virology 160:38-47 (1987); U.S. Pat. No. 4,797,368; WO 93/24641; Kotin, Human Gene Therapy 5:793-801 (1994); Muzyczka, J. Clin. Invest. 94:1351 (1994). The construction of recombinant AAV vectors is described in a number of publications, including U.S. Pat. No. 5,173,414; Tratschin et al., Mol. Cell. Biol. 5:3251-3260 (1985); Tratschin, et al., Mol. Cell. Biol. 4:2072-2081 (1984); Hermonat & Muzyczka, PNAS 81:6466-6470 (1984); and Samulski et al., J. Virol. 63:03822-3828 (1989).

[0907] AAV is a small, single-stranded DNA dependent virus belonging to the parvovirus family. The 4.7 kb wild-type (wt) AAV genome is made up of two genes that encode four replication proteins and three capsid proteins, respectively, and is flanked on either side by 145-bp inverted terminal repeats (ITRs). The virion is composed of three capsid proteins, Vp1, Vp2, and Vp3, produced in a 1:1:10 ratio from the same open reading frame but from differential splicing (Vp1) and alternative translational start sites (Vp2 and Vp3, respectively). Vp3 is the most abundant subunit in the virion and participates in receptor recognition at the cell surface defining the tropism of the virus. A phospholipase domain, which functions in viral infectivity, has been identified in the unique N terminus of Vp1.

[0908] Similar to wt AAV, recombinant AAV (rAAV) utilizes the cis-acting 145-bp ITRs to flank vector transgene cassettes, providing up to 4.5 kb for packaging of foreign DNA. Subsequent to infection, rAAV can express a fusion protein of the invention and persist without integration into the host genome by existing episomally in circular head-to-tail concatemers. Although there are numerous examples of rAAV success using this system, in vitro and in vivo, the limited packaging capacity has limited the use of AAV-mediated gene delivery when the length of the coding sequence of the gene is equal or greater in size than the wt AAV genome.

[0909] Viral vectors can be selected based on the application. For example, for in vivo gene delivery, AAV can be advantageous over other viral vectors. In some embodiments, AAV allows low toxicity, which can be due to the purification method not requiring ultra-centrifugation of cell particles that can activate the immune response. In some embodiments, AAV allows low probability of causing insertional mutagenesis because it doesn't integrate into the host genome. Adenoviruses are commonly used as vaccines because of the strong immunogenic response they induce. Packaging capacity of the viral vectors can limit the size of the base editor that can be packaged into the vector.

[0910] AAV has a packaging capacity of about 4.5 Kb or 4.75 Kb including two 145 base inverted terminal repeats (ITRs). This means disclosed base editor as well as a promoter and transcription terminator can fit into a single viral vector. Constructs larger than 4.5 or 4.75 Kb can lead to significantly reduced virus production. For example, SpCas9 is quite large, the gene itself is over 4.1 Kb, which makes it difficult for packing into AAV. Therefore, embodiments of the present disclosure include utilizing a disclosed base editor which is shorter in length than conventional base editors. In some examples, the base editors are less than 4 kb. Disclosed base editors can be less than 4.5 kb, 4.4 kb, 4.3 kb, 4.2 kb, 4.1 kb, 4 kb, 3.9 kb, 3.8 kb, 3.7 kb, 3.6 kb, 3.5 kb, 3.4 kb, 3.3 kb, 3.2 kb, 3.1 kb, 3 kb, 2.9 kb, 2.8 kb, 2.7 kb, 2.6 kb, 2.5 kb, 2 kb, or 1.5 kb. In some embodiments, the disclosed base editors are 4.5 kb or less in length.

[0911] An AAV can be AAV1, AAV2, AAV5 or any combination thereof. One can select the type of AAV with regard to the cells to be targeted; e.g., one can select AAV serotypes 1, 2, 5 or a hybrid capsid AAV1, AAV2, AAV5 or any combination thereof for targeting brain or neuronal cells; and one can select AAV4 for targeting cardiac tissue. AAV8 is useful for delivery to the liver. A tabulation of certain AAV serotypes as to these cells can be found in Grimm, D. et al, J. Virol. 82: 5887-5911 (2008)).

[0912] Lentiviruses are complex retroviruses that have the ability to infect and express their genes in both mitotic and post-mitotic cells. The most commonly known lentivirus is the human immunodeficiency virus (HIV), which uses the envelope glycoproteins of other viruses to target a broad range of cell types.

[0913] Lentiviruses can be prepared as follows. After cloning pCasES10 (which contains a lentiviral transfer plasmid backbone), HEK293FT at low passage (p=5) were seeded in a T-75 flask to 50% confluence the day before transfection in DMEM with 10% fetal bovine serum and without antibiotics. After 20 hours, media is changed to OptiMEM (serum-free) media and transfection was done 4 hours later. Cells are transfected with 10 μg of lentiviral transfer plasmid (pCasES10) and the following packaging plasmids: 5 μg of pMD2.G (VSV-g pseudotype), and 7.5 μg of psPAX2 (gag/pol/rev/tat). Transfection can be done in 4 mL OptiMEM with a cationic lipid delivery agent (50 μl Lipofectamine 2000 and 100 ul Plus reagent). After 6 hours, the media is changed to antibiotic-free DMEM with 10% fetal bovine serum. These methods use serum during cell culture, but serum-free methods are preferred.

[0914] Lentivirus can be purified as follows. Viral supernatants are harvested after 48 hours. Supernatants are first cleared of debris and filtered through a 0.45 μm low protein binding (PVDF) filter. They are then spun in an ultracentrifuge for 2 hours at 24,000 rpm. Viral pellets are resuspended in 50 μl of DMEM overnight at 4° C. They are then aliquoted and immediately frozen at −80° C.

[0915] In another embodiment, minimal non-primate lentiviral vectors based on the equine infectious anemia virus (EIAV) are also contemplated. In another embodiment, RetinoStat®, an equine infectious anemia virus-based lentiviral gene therapy vector that expresses angiostatic proteins endostatin and angiostatin that is contemplated to be delivered via a subretinal injection. In another embodiment, use of a self-inactivating lentiviral vector is contemplated.

[0916] Any RNA of the systems, for example a guide RNA or a base editor-encoding mRNA, can be delivered in the form of RNA. Base editor-encoding mRNA can be generated using in vitro transcription. For example, nuclease mRNA can be synthesized using a PCR cassette containing the following elements: T7 promoter, optional kozak sequence (GCCACC), nuclease sequence, and 3′ UTR such as a 3′ UTR from beta globin-polyA tail. The cassette can be used for transcription by T7 polymerase. Guide polynucleotides (e.g., gRNA) can also be transcribed using in vitro transcription from a cassette containing a T7 promoter, followed by the sequence “G”, and guide polynucleotide sequence.

[0917] To enhance expression and reduce possible toxicity, the base editor-coding sequence and/or the guide nucleic acid can be modified to include one or more modified nucleoside e.g. using pseudo-U or 5-Methyl-C.

[0918] The small packaging capacity of AAV vectors makes the delivery of a number of genes that exceed this size and/or the use of large physiological regulatory elements challenging. These challenges can be addressed, for example, by dividing the protein(s) to be delivered into two or more fragments, wherein the N-terminal fragment is fused to a split intein-N and the C-terminal fragment is fused to a split intein-C. These fragments are then packaged into two or more AAV vectors. As used herein, “intein” refers to a self-splicing protein intron (e.g., peptide) that ligates flanking N-terminal and C-terminal exteins (e.g., fragments to be joined). The use of certain inteins for joining heterologous protein fragments is described, for example, in Wood et al., J. Biol. Chem. 289(21); 14512-9 (2014). For example, when fused to separate protein fragments, the inteins IntN and IntC recognize each other, splice themselves out and simultaneously ligate the flanking N- and C-terminal exteins of the protein fragments to which they were fused, thereby reconstituting a full-length protein from the two protein fragments. Other suitable inteins will be apparent to a person of skill in the art.

[0919] A fragment of a fusion protein of the invention can vary in length. In some embodiments, a protein fragment ranges from 2 amino acids to about 1000 amino acids in length. In some embodiments, a protein fragment ranges from about 5 amino acids to about 500 amino acids in length. In some embodiments, a protein fragment ranges from about 20 amino acids to about 200 amino acids in length. In some embodiments, a protein fragment ranges from about 10 amino acids to about 100 amino acids in length. Suitable protein fragments of other lengths will be apparent to a person of skill in the art.

[0920] In one embodiment, dual AAV vectors are generated by splitting a large transgene expression cassette in two separate halves (5′ and 3′ ends, or head and tail), where each half of the cassette is packaged in a single AAV vector (of <5 kb). The re-assembly of the full-length transgene expression cassette is then achieved upon co-infection of the same cell by both dual AAV vectors followed by: (1) homologous recombination (HR) between 5′ and 3′ genomes (dual AAV overlapping vectors); (2) ITR-mediated tail-to-head concatemerization of 5′ and 3′ genomes (dual AAV trans-splicing vectors); or (3) a combination of these two mechanisms (dual AAV hybrid vectors). The use of dual AAV vectors in vivo results in the expression of full-length proteins. The use of the dual AAV vector platform represents an efficient and viable gene transfer strategy for transgenes of >4.7 kb in size.

### Inteins

[0921] In some embodiments, a portion or fragment of a nuclease (e.g., Cas9) is fused to an intein. The nuclease can be fused to the N-terminus or the C-terminus of the intein. In some embodiments, a portion or fragment of a fusion protein is fused to an intein and fused to an AAV capsid protein. The intein, nuclease and capsid protein can be fused together in any arrangement (e.g., nuclease-intein-capsid, intein-nuclease-capsid, capsid-intein-nuclease, etc.). In some embodiments, the N-terminus of an intein is fused to the C-terminus of a fusion protein and the C-terminus of the intein is fused to the N-terminus of an AAV capsid protein.

[0922] Inteins (intervening protein) are auto-processing domains found in a variety of diverse organisms, which carry out a process known as protein splicing. Protein splicing is a multi-step biochemical reaction comprised of both the cleavage and formation of peptide bonds. While the endogenous substrates of protein splicing are proteins found in intein-containing organisms, inteins can also be used to chemically manipulate virtually any polypeptide backbone.

[0923] In protein splicing, the intein excises itself out of a precursor polypeptide by cleaving two peptide bonds, thereby ligating the flanking extein (external protein) sequences via the formation of a new peptide bond. This rearrangement occurs post-translationally (or possibly co-translationally). Intein-mediated protein splicing occurs spontaneously, requiring only the folding of the intein domain.

[0924] About 5% of inteins are split inteins, which are transcribed and translated as two separate polypeptides, the N-intein and C-intein, each fused to one extein. Upon translation, the intein fragments spontaneously and non-covalently assemble into the canonical intein structure to carry out protein splicing in trans. The mechanism of protein splicing entails a series of acyl-transfer reactions that result in the cleavage of two peptide bonds at the intein-extein junctions and the formation of a new peptide bond between the N- and C-exteins. This process is initiated by activation of the peptide bond joining the N-extein and the N-terminus of the intein. Virtually all inteins have a cysteine or serine at their N-terminus that attacks the carbonyl carbon of the C-terminal N-extein residue. This N to O/S acyl-shift is facilitated by a conserved threonine and histidine (referred to as the TXXH motif), along with a commonly found aspartate, which results in the formation of a linear (thio)ester intermediate. Next, this intermediate is subject to trans-(thio)esterification by nucleophilic attack of the first C-extein residue (+1), which is a cysteine, serine, or threonine. The resulting branched (thio)ester intermediate is resolved through a unique transformation: cyclization of the highly conserved C-terminal asparagine of the intein. This process is facilitated by the histidine (found in a highly conserved HNF motif) and the penultimate histidine and may also involve the aspartate. This succinimide formation reaction excises the intein from the reactive complex and leaves behind the exteins attached through a non-peptidic linkage. This structure rapidly rearranges into a stable peptide bond in an intein-independent fashion.

[0925] In some embodiments, an N-terminal fragment of a base editor (e.g., ABE, CBE) is fused to a split intein-N and a C-terminal fragment is fused to a split intein-C. These fragments are then packaged into two or more AAV vectors. The use of certain inteins for joining heterologous protein fragments is described, for example, in Wood et al., J. Biol. Chem. 289(21); 14512-9 (2014). For example, when fused to separate protein fragments, the inteins IntN and IntC recognize each other, splice themselves out and simultaneously ligate the flanking N- and C-terminal exteins of the protein fragments to which they were fused, thereby reconstituting a full-length protein from the two protein fragments. Other suitable inteins will be apparent to a person of skill in the art.

[0926] In some embodiments, an ABE was split into N- and C-terminal fragments at Ala, Ser, Thr, or Cys residues within selected regions of SpCas9. These regions correspond to loop regions identified by Cas9 crystal structure analysis. The N-terminus of each fragment is fused to an intein-N and the C-terminus of each fragment is fused to an intein C at amino acid positions S303, T310, T313, S355, A456, S460, A463, T466, S469, T472, T474, C574, S577, A589, and S590, which are indicated in Bold Capitals in the sequence below.

| | |
|---|---|
| 1 | mdkkysigld igtnsvgwav itdeykvpsk kfkvlgntdr |
| | hsikknliga llfdsgetae |
| 61 | atrlkrtarr rytrrknric ylqeifsnem akvddsffhr |
| | leesflveed kkherhpifg |
| 121 | nivdevayhe kyptiyhlrk klvdstdkad lrliylalah |
| | mikfrghfli egdlnpdnsd |
| 181 | vdklfiqlvq tynqlfeenp inasgvdaka ilsarlsksr |
| | rlenliaqlp gekknglfgn |
| 241 | lialslgltp nfksnfdlae daklqlskdt ydddldnlla |
| | qigdqyadlf laaknlsdai |
| 301 | llSdilrvnT eiTkaplsas mikrydehhq dltllkalvr |
| | qqlpekykei ffdqSkngya |
| 361 | gyidggasqe efykfikpil ekmdgteell vklnredllr |
| | kqrtfdngsi phqihlgelh |
| 421 | ailrrqedfy pflkdnreki ekiltfripy yvgplArgnS |
| | rfAwmTrkSe eTiTpwnfee |
| 481 | vvdkgasaqs fiermtnfdk nlpnekvlpk hsllyeyftv |
| | yneltkvkyv tegmrkpafl |
| 541 | sgeqkkaivd llfktnrkvt vkqlkedyfk kieCfdSvei |
| | sgvedrfnAS lgtyhdllki |
| 601 | ikdkdfldne enedilediv ltltlfedre mieerlktya |
| | hlfddkvmkq lkrrrytgwg |
| 661 | rlsrklingi rdkqsgktil dflksdgfan rnfmqlihdd |
| | sltfkediqk aqvsgqgdsl |
| 721 | hehianlags paikkgilqt vkvvdelvkv mgrhkpeniv |
| | iemarenqtt qkgqknsrer |
| 781 | mkrieegike lgsqilkehp ventqlqnek lylyylqngr |
| | dmyvdqeldi nrlsdydvdh |
| 841 | ivpqsflkdd sidnkvltrs dknrgksdnv pseevvkkmk |
| | nywrqllnak litqrkfdnl |
| 901 | tkaergglse ldkagfikrq lvetrqitkh vaqildsrmn |
| | tkydendkli revkvitlks |
| 961 | klvsdfrkdf qfykvreinn yhhandayln avvgtalikk |
| | ypklesefvy gdykvydvrk |
| 1021 | miakseqeig katakyffys nimnffktei tlangeirkr |
| | plietngetg eivwdkgrdf |
| 1081 | atvrkvlsmp qvnivkktev qtggfskesi lpkrnsdkli |
| | arkkdwdpkk yggfdsptva |
| 1141 | ysvlvvakve kgkskklksv kellgitime rssfeknpid |
| | fleakgykev kkdliiklpk |
| 1201 | yslfelengr krmlasagel qkgnelalps kyvnflylas |
| | hyeklkgspe dneqkqlfve |
| 1261 | qhkhyldeii eqisefskry iladanldkv lsaynkhrdk |
| | pireqaenii hlftltnlga |
| 1321 | paafkyfdtt idrkrytstk evldatlihq sitglyetri |
| | dlsqlggd |

### Use of Nucleobase Editors to Target Mutations

[0927] The suitability of nucleobase editors that targets a mutation is evaluated as described herein. In one embodiment, a single cell of interest is transduced with a base editing system together with a small amount of a vector encoding a reporter (e.g., GFP). These cells can be any cell line known in the art, including immortalized human cell lines, such as 293T, K562 or U20S. Alternatively, primary cells (e.g., human) may be used. Such cells may be relevant to the eventual cell target.

[0928] Delivery may be performed using a viral vector. In one embodiment, transfection may be performed using lipid transfection (such as Lipofectamine or Fugene) or by electroporation. Following transfection, expression of GFP can be determined either by fluorescence microscopy or by flow cytometry to confirm consistent and high levels of transfection. These preliminary transfections can comprise different nucleobase editors to determine which combinations of editors give the greatest activity.

[0929] The activity of the nucleobase editor is assessed as described herein, i.e., by sequencing the genome of the cells to detect alterations in a target sequence. For Sanger sequencing, purified PCR amplicons are cloned into a plasmid backbone, transformed, miniprepped and sequenced with a single primer. Sequencing may also be performed using next generation sequencing techniques. When using next generation sequencing, amplicons may be 300-500 bp with the intended cut site placed asymmetrically. Following PCR, next generation sequencing adapters and barcodes (for example Illumina multiplex adapters and indexes) may be added to the ends of the amplicon, e.g., for use in high throughput sequencing (for example on an Illumina MiSeq).

[0930] The fusion proteins that induce the greatest levels of target specific alterations in initial tests can be selected for further evaluation.

[0931] In particular embodiments, the nucleobase editors are used to target polynucleotides of interest. In one embodiment, a nucleobase editor of the invention is delivered to cells (e.g., hematopoietic cells or their progenitors, hematopoietic stem cells, and/or induced pluripotent stem cells) in conjunction with a guide RNA that is used to target a mutation of interest within the genome of a cell, thereby altering the mutation. In some embodiments, a base editor is targeted by a guide RNA to introduce one or more edits to the sequence of a gene of interest.

[0932] In one embodiment, a nucleobase editor is used to target a regulatory sequence, including but not limited to splice sites, enhancers, and transcriptional regulatory elements. The effect of the alteration on the expression of a gene controlled by the regulatory element is then assayed using any method known in the art.

[0933] In other embodiments, a nucleobase editor of the invention is used to target a polynucleotide encoding a Complementarity Determining Region (CDR), thereby creating alterations in the expressed CDR. The effect of these alterations on CDR function is then assayed, for example, by measuring the specific binding of the CDR to its antigen.

[0934] In still other embodiments, a nucleobase editor of the invention is used to target polynucleotides of interest within the genome of an organism. In one embodiment, a nucleobase editor of the invention is delivered to cells in conjunction with a library of guide RNAs that are used to tile a variety of sequences within the genome of a cell, thereby systematically altering sequences throughout the genome.

[0935] The system can comprise one or more different vectors. In an aspect, the base editor is codon optimized for expression the desired cell type, preferentially a eukaryotic cell, preferably a mammalian cell or a human cell.

[0936] In general, codon optimization refers to a process of modifying a nucleic acid sequence for enhanced expression in the host cells of interest by replacing at least one codon (e.g. about or more than about 1, 2, 3, 4, 5, 10, 15, 20, 25, 50, or more codons) of the native sequence with codons that are more frequently or most frequently used in the genes of that host cell while maintaining the native amino acid sequence. Various species exhibit particular bias for certain codons of a particular amino acid. Codon bias (differences in codon usage between organisms) often correlates with the efficiency of translation of messenger RNA (mRNA), which is in turn believed to be dependent on, among other things, the properties of the codons being translated and the availability of particular transfer RNA (tRNA) molecules. The predominance of selected tRNAs in a cell is generally a reflection of the codons used most frequently in peptide synthesis. Accordingly, genes can be tailored for optimal gene expression in a given organism based on codon optimization. Codon usage tables are readily available, for example, at the “Codon Usage Database” available at www.kazusa.orjp/codon/ (visited Jul. 9, 2002), and these tables can be adapted in a number of ways. See, Nakamura, Y., et al. “Codon usage tabulated from the international DNA sequence databases: status for the year 2000” Nucl. Acids Res. 28:292 (2000). Computer algorithms for codon optimizing a particular sequence for expression in a particular host cell are also available, such as Gene Forge (Aptagen; Jacobus, Pa.), are also available. In some embodiments, one or more codons (e.g. 1, 2, 3, 4, 5, 10, 15, 20, 25, 50, or more, or all codons) in a sequence encoding an engineered nuclease correspond to the most frequently used codon for a particular amino acid.

[0937] Packaging cells are typically used to form virus particles that are capable of infecting a host cell. Such cells include 293 cells, which package adenovirus, and psi.2 cells or PA317 cells, which package retrovirus. Viral vectors used in gene therapy are usually generated by producing a cell line that packages a nucleic acid vector into a viral particle. The vectors typically contain the minimal viral sequences required for packaging and subsequent integration into a host, other viral sequences being replaced by an expression cassette for the polynucleotide(s) to be expressed. The missing viral functions are typically supplied in trans by the packaging cell line. For example, AAV vectors used in gene therapy typically only possess ITR sequences from the AAV genome which are required for packaging and integration into the host genome. Viral DNA can be packaged in a cell line, which contains a helper plasmid encoding the other AAV genes, namely rep and cap, but lacking ITR sequences. The cell line can also be infected with adenovirus as a helper. The helper virus can promote replication of the AAV vector and expression of AAV genes from the helper plasmid. The helper plasmid in some cases is not packaged in significant amounts due to a lack of ITR sequences. Contamination with adenovirus can be reduced by, e.g., heat treatment to which adenovirus is more sensitive than AAV.

### Methods of Using Base Editors

[0938] The correction of point mutations in disease-associated genes and alleles provides new strategies for gene correction with applications in therapeutics and basic research.

[0939] The present disclosure provides methods for the treatment of a subject diagnosed with a disease associated with or caused by a point mutation that can be corrected by a base editor system provided herein. For example, in some embodiments, a method is provided that comprises administering to a subject having such a disease, e.g., a disease caused by a genetic mutation, an effective amount of a nucleobase editor (e.g., an adenosine deaminase base editor or a cytidine deaminase base editor) that corrects the point mutation in the disease associated gene. The present disclosure provides methods for the treatment of diseases that are associated with or caused by a point mutation that can be corrected by deaminase-mediated gene editing. Suitable diseases that can be treated with the strategies and fusion proteins provided herein will be apparent to those of skill in the art based on the instant disclosure. Provided herein are methods of using a base editor or base editor system for editing a nucleobase in a target nucleotide sequence associated with a disease or disorder. In some embodiments, the activity of the base editor (e.g., comprising an adenosine deaminase and a Cas12 domain) results in a correction of the point mutation. In some embodiments, the target DNA sequence comprises a G-A point mutation associated with a disease or disorder, and deamination of the mutant A base results in a sequence that is not associated with a disease or disorder. In some embodiments, the target DNA sequence comprises a T-C point mutation associated with a disease or disorder, and deamination of the mutant C base results in a sequence that is not associated with a disease or disorder.

[0940] In some embodiments, the target DNA sequence encodes a protein, and the point mutation is in a codon and results in a change in the amino acid encoded by the mutant codon as compared to the wild-type codon. In some embodiments, the deamination of the mutant A results in a change of the amino acid encoded by the mutant codon. In some embodiments, the deamination of the mutant A results in the codon encoding the wild-type amino acid. In some embodiments, the deamination of the mutant C results in a change of the amino acid encoded by the mutant codon. In some embodiments, the deamination of the mutant C results in the codon encoding the wild-type amino acid. In some embodiments, the subject has or has been diagnosed with a disease or disorder.

[0941] In some embodiments, the adenosine deaminases provided herein are capable of deaminating a deoxyadenosine residue of DNA. Other aspects of the disclosure provide fusion proteins that comprise an adenosine deaminase (e.g., an adenosine deaminase that deaminates deoxyadenosine in DNA as described herein) and a domain (e.g., a Cas12) capable of binding to a specific nucleotide sequence. For example, the adenosine can be converted to an inosine residue, which typically base pairs with a cytosine residue. Such fusion proteins are useful, inter alia, for targeted editing of nucleic acid sequences. Such fusion proteins can be used for targeted editing of DNA in vitro, e.g., for the generation of mutant cells or animals; for the introduction of targeted mutations, e.g., for the correction of genetic defects in cells ex vivo, e.g., in cells obtained from a subject that are subsequently re-introduced into the same or another subject; and for the introduction of targeted mutations in vivo, e.g., the correction of genetic defects or the introduction of deactivating mutations in disease-associated genes in a G to A, or a T to C to mutation can be treated using the nucleobase editors provided herein. The present disclosure provides deaminases, fusion proteins, nucleic acids, vectors, cells, compositions, methods, kits, systems, etc. that utilize the deaminases and nucleobase editors.

### Generating an Intended Mutation

[0942] In some embodiments, the purpose of the methods provided herein is to restore the function of a dysfunctional gene via gene editing. In some embodiments, the function of a dysfunctional gene is restored by introducing an intended mutation. In some embodiments, the methods provided herein can be used to disrupt the normal function of a gene product. The nucleobase editing proteins provided herein can be validated for gene editing-based human therapeutics in vitro, e.g., by correcting a disease-associated mutation in human cell culture. It will be understood by the skilled artisan that the nucleobase editing proteins provided herein, e.g., the fusion proteins comprising a napDNAbp domain (e.g., Cas12) and a nucleobase editing domain (e.g., an adenosine deaminase domain or a cytidine deaminase domain) can be used to correct any single point A to G or C to T mutation. In the first case, deamination of the mutant A to I corrects the mutation, and in the latter case, deamination of the A that is base-paired with the mutant T, followed by a round of replication, corrects the mutation.

[0943] In some embodiments, the present disclosure provides base editors that efficiently generate an intended mutation, such as a point mutation, in a nucleic acid (e.g., a nucleic acid within a genome of a subject) without generating a significant number of unintended mutations, such as unintended point mutations. In some embodiments, an intended mutation is a mutation that is generated by a specific base editor (e.g., cytidine base editor or adenosine base editor) bound to a guide polynucleotide (e.g., gRNA), specifically designed to generate the intended mutation. In some embodiments, the intended mutation is a mutation associated with a disease or disorder. In some embodiments, the intended mutation is an adenine (A) to guanine (G) point mutation associated with a disease or disorder. In some embodiments, the intended mutation is a cytosine (C) to thymine (T) point mutation associated with a disease or disorder. In some embodiments, the intended mutation is an adenine (A) to guanine (G) point mutation within the coding region or non-coding region of a gene. In some embodiments, the intended mutation is a cytosine (C) to thymine (T) point mutation within the coding region or non-coding region of a gene. In some embodiments, the intended mutation is a point mutation that generates a stop codon, for example, a premature stop codon within the coding region of a gene. In some embodiments, the intended mutation is a mutation that eliminates a stop codon.

[0944] In some embodiments, any of the base editors provided herein are capable of generating a ratio of intended mutations to unintended mutations (e.g., intended point mutations:unintended point mutations) that is greater than 1:1. In some embodiments, any of the base editors provided herein are capable of generating a ratio of intended mutations to unintended mutations (e.g., intended point mutations:unintended point mutations) that is at least 1.5:1, at least 2:1, at least 2.5:1, at least 3:1, at least 3.5:1, at least 4:1, at least 4.5:1, at least 5:1, at least 5.5:1, at least 6:1, at least 6.5:1, at least 7:1, at least 7.5:1, at least 8:1, at least 10:1, at least 12:1, at least 15:1, at least 20:1, at least 25:1, at least 30:1, at least 40:1, at least 50:1, at least 100:1, at least 150:1, at least 200:1, at least 250:1, at least 500:1, or at least 1000:1, or more

[0945] Details of base editor efficiency are described in International PCT Application Nos. PCT/2017/045381 (WO 2018/027078) and PCT/US2016/058344 (WO 2017/070632), each of which is incorporated herein by reference for its entirety. Also see Komor, A. C., et al., “Programmable editing of a target base in genomic DNA without double-stranded DNA cleavage” Nature 533, 420-424 (2016); Gaudelli, N. M., et al., “Programmable base editing of A⋅T to G⋅C in genomic DNA without DNA cleavage” Nature 551, 464-471 (2017); and Komor, A. C., et al., “Improved base excision repair inhibition and bacteriophage Mu Gam protein yields C:G-to-T:A base editors with higher efficiency and product purity” Science Advances 3:eaao4774 (2017), the entire contents of which are hereby incorporated by reference.

[0946] In some embodiments, editing of a plurality of nucleobase pairs in one or more genes using the methods provided herein results in formation of at least one intended mutation. In some embodiments, said formation of said at least one intended mutation results in a precise correction of a disease-causing mutation. It should be appreciated that multiplex editing can be accomplished using any method or combination of methods provided herein.

### I. Modification of the SOD Gene

[0947] The disruption of normal splicing by targeting a splice acceptor located in intronic nucleic acid sequence 5′ of one or more exons of a disease-associated gene (e.g., the SOD1 gene associated with ALS) or allele provides a useful strategy for affecting transcription of the disease-associated gene and has applications in therapeutics and basic research. Without wishing to be bound by theory, the base editing systems and methods described herein which disrupt normal mRNA splicing can result in alternative splicing of a gene transcript, thereby producing an alternatively spliced mRNA, which can lead to a truncated protein and/or an aberrant or abnormal protein product, which is non-functional or has limited function. In some cases, the base editing systems and methods described herein which disrupt normal mRNA splicing can result in mRNA transcripts that may be degraded in the cell. Alternatively, the disruption of normal mRNA splicing may ultimately generate abnormal protein products (e.g., truncated proteins or misfolded proteins) which are degraded in the cell, or protein products which have reduced function or are rendered nonfunctional.

[0948] The present disclosure provides methods for the treatment of a subject diagnosed with a disease associated with a disease gene, such as the SOD1 gene associated with ALS, using a base editor system as provided herein to cause splice disruption during transcription of the SOD1 gene. For example, in some embodiments, a method is provided that comprises administering to a subject having such a disease an effective amount of a nucleobase editor (e.g., an adenosine deaminase base editor or a cytidine deaminase base editor) that disrupts splicing of the mRNA during transcription of the disease associated gene. The present disclosure provides methods for the treatment of ALS in which splicing of the SOD1 mRNA transcript is disrupted by deaminase-mediated base editing of the splice acceptor (i.e., the AG site) in the non-coding nucleic acid sequence located 5′ of an exon of the ALS-associated SOD1 gene sequence, e.g., exon 3 of the SOD1 gene sequence, particularly, the human SOD1 gene sequence.

[0949] Provided herein are methods of using a base editor or base editor system for editing a nucleobase in the splice acceptor situated 5′ of an exon of the disease- or disorder-associated gene. In some embodiments, the target DNA sequence is a splice acceptor in the intron of a genomic sequence adjacent to an exon of the disease-associated gene and results in a change in the splice acceptor compared to a wild-type splice acceptor. In some embodiments, the deamination of the A nucleobase in the splice acceptor results in disruption of splicing of the mRNA transcript during transcription. In some embodiments, the subject has or has been diagnosed with a disease or disorder.

[0950] In some embodiments, the activity of the base editor (e.g., comprising an adenosine deaminase and a Cas9 domain) alters the splice acceptor 5′ of an exon of the disease-associated gene, e.g., the splice acceptor AG nucleotide sequence 5′ of exon 3 of the SOD1 gene, causing disruption of normal splicing during transcription of the gene. In some embodiments, the adenosine nucleotide of the canonical AG splice acceptor nucleic acid sequence adjacent to an exon of a gene associated with a disease or disorder is deaminated to result in a guanosine nucleotide, thereby altering the canonical AG splice acceptor such that normal splicing during transcription of the gene is affected, for example, an alternatively spliced gene transcript results, and normal production (translation) of the disease-associated protein is adversely affected.

[0951] In some embodiments, the adenosine deaminases provided herein are capable of deaminating a deoxyadenosine residue of DNA. Other aspects of the disclosure provide fusion proteins that comprise an adenosine deaminase (e.g., an adenosine deaminase that deaminates deoxyadenosine in DNA as described herein) and a domain (e.g., a Cas9 or a Cpf1 protein) capable of binding to a specific nucleotide sequence. For example, the adenosine can be converted to an inosine residue, which typically base pairs with a cytosine residue. Such fusion proteins are useful inter alia for targeted editing of nucleic acid sequences. Such fusion proteins can be used for targeted editing of DNA in vitro, e.g., for the generation of mutant cells or animals; for the introduction of targeted mutations, e.g., in splice acceptors adjacent to an exon of a disease-associated gene in cells ex vivo, e.g., in cells obtained from a subject that are subsequently re-introduced into the same or another subject; and for the introduction of targeted mutations in vivo, e.g., the introduction of a splice disrupting mutation in a splice acceptor (“AG” sequence) affecting normal transcription of a disease-associated gene (e.g., SOD1) to treat the disease (ALS) using the nucleobase editors provided herein. The present disclosure provides deaminases, fusion proteins, nucleic acids, vectors, cells, compositions, methods, kits, systems, etc. that utilize the deaminases and nucleobase editors.

### Use of Nucleobase Editors to Target the SOD1 Gene

[0952] The suitability of nucleobase editors that target a nucleotide in the splice acceptor 5′ of an exon of the SOD1 gene evaluated as described herein. In one embodiment, a single cell of interest is transfected, transduced, or otherwise modified with a nucleic acid molecule or molecules encoding a nucleobase editor described herein together with a small amount of a vector encoding a reporter (e.g., GFP). These cells can be immortalized human cell lines, such as 293T, K562 or U20S cells. Alternatively, primary human cells may be used. Cells may also be obtained from a subject or individual, such as from tissue biopsy, surgery, blood, plasma, serum, or other biological fluid. Such cells may be relevant to the eventual cell target.

[0953] Delivery may be performed using a viral vector as further described below. In one embodiment, transfection may be performed using lipid transfection (such as Lipofectamine or Fugene) or by electroporation. Following transfection, expression of GFP can be determined either by fluorescence microscopy or by flow cytometry to confirm consistent and high levels of transfection. These preliminary transfections can comprise different nucleobase editors to determine which combinations of editors give the greatest activity.

[0954] The activity of the nucleobase editor is assessed as described herein, i.e., by sequencing the target gene to detect alterations in the target sequence. For Sanger sequencing, purified PCR amplicons are cloned into a plasmid backbone, transformed, miniprepped and sequenced with a single primer. Sequencing may also be performed using next generation sequencing techniques. When using next generation sequencing, amplicons may be 300-500 bp with the intended cut site placed asymmetrically. Following PCR, next generation sequencing adapters and barcodes (for example Illumina multiplex adapters and indexes) may be added to the ends of the amplicon, e.g., for use in high throughput sequencing (for example on an Illumina MiSeq).

[0955] The fusion proteins that induce the greatest levels of target specific alterations in initial tests can be selected for further evaluation.

[0956] In particular embodiments, the nucleobase editors are used to target polynucleotides of interest. In one embodiment, a nucleobase editor as described herein is delivered to cells (e.g., a motor neuron) in conjunction with a guide RNA that is used to target a nucleic acid sequence, e.g., a nucleobase in a splice acceptor of an exon, e.g., exon 3, of the SOD1 gene, thereby disrupting the splice acceptor, altering transcription of the SOD1 gene, and, ultimately, affecting the production of SOD1 protein, e.g., by causing the production of alternate transcripts.

[0957] In some embodiments, a base editor is targeted by a guide RNA to introduce one or more edits to the sequence of interest.

### Generating an Intended Mutation

[0958] In some embodiments, the purpose of the methods provided herein is to disrupt mRNA splicing during transcription of a gene associated with or causing a disease via base editing of a splice acceptor (e.g., the AG sequence motif located 3′ of an intron and 5′ of an exon of a disease-associated or disease-causing gene. In some embodiments, the transcription of the gene is altered or modulated by introducing an intended mutation into the splice acceptor. In some embodiments, a disease-associated gene is not transcribed or is not normally transcribed due to base editing of the splice acceptor 5′ of an exon of a disease-associated or disease-causing gene, such that mRNA splicing is disrupted. In some embodiments, alternative transcription of the gene results from the splice disruption as described herein. In some embodiments, alternative transcription of the gene results in a truncated and/or nonfunctional protein product encoded by the gene. In some embodiments, the methods provided herein can be used to disrupt the normal function of a gene product. The nucleobase editing proteins provided herein can be validated for gene editing-based human therapeutics in vitro, e.g., by reducing or alleviating the production of a normal or functional protein encoded by a disease-associated gene in human cell culture. It will be understood by the skilled artisan that the nucleobase editing proteins provided herein, e.g., the fusion proteins comprising a polynucleotide programmable nucleotide binding domain (e.g., Cas9) and a nucleobase editing domain (e.g., an adenosine deaminase domain or a cytidine deaminase domain) can be used to edit or precisely change an A to a G nucleobase in the splice acceptor 5′ of an exon of a disease-associated or disease-causing gene. In some embodiments, the present disclosure provides base editors that efficiently generate an intended mutation, such as a point mutation, in a nucleic acid (e.g., a nucleic acid within a genome of a subject) without generating a significant number of unintended mutations, such as unintended point mutations. In some embodiments, an intended mutation is a mutation that is generated by a specific base editor (e.g., an adenosine base editor or a cytidine base editor) bound to a guide polynucleotide (e.g., gRNA), specifically designed to generate the intended mutation. In some embodiments, the intended mutation is an adenine (A) to guanine (G) point mutation within the non-coding region of a gene. In some embodiments, the intended mutation is a cytosine (C) to thymine (T) point mutation within the non-coding region of a gene. In some embodiments, the intended mutation is a mutation of a splice acceptor in the non-coding region 5′ of an exon of a gene associated with a disease or disorder. In some embodiments, the intended mutation is an adenine (A) to guanine (G) point mutation in the splice acceptor in the non-coding region 5′ of an exon of a gene associated with a disease or disorder. In some embodiments, the intended mutation is a mutation that disrupts normal splicing of a complete transcript of a gene, for example, an A to G change in the splice acceptor within the non-coding region located 5′ of an exon of a disease-causing or a disease-associated gene. In some embodiments, the intended mutation is a mutation in the splice acceptor that disrupts splicing of a gene transcript and results in an alternative transcript that encodes a truncated and/or nonfunctional protein product.

[0959] In some embodiments, any of the base editors provided herein are capable of generating a ratio of intended mutations to unintended mutations (e.g., intended point mutations:unintended point mutations) that is greater than 1:1. In some embodiments, any of the base editors provided herein are capable of generating a ratio of intended mutations to unintended mutations (e.g., intended point mutations:unintended point mutations) that is at least 1.5:1, at least 2:1, at least 2.5:1, at least 3:1, at least 3.5:1, at least 4:1, at least 4.5:1, at least 5:1, at least 5.5:1, at least 6:1, at least 6.5:1, at least 7:1, at least 7.5:1, at least 8:1, at least 10:1, at least 12:1, at least 15:1, at least 20:1, at least 25:1, at least 30:1, at least 40:1, at least 50:1, at least 100:1, at least 150:1, at least 200:1, at least 250:1, at least 500:1, or at least 1000:1, or more.

[0960] Details of base editor efficiency are described in International PCT Application Nos. PCT/2017/045381 (WO 2018/027078) and PCT/US2016/058344 (WO 2017/070632), each of which is incorporated herein by reference for its entirety. Also see Komor, A. C., et al., “Programmable editing of a target base in genomic DNA without double-stranded DNA cleavage” Nature 533, 420-424 (2016); Gaudelli, N. M., et al., “Programmable base editing of A⋅T to G⋅C in genomic DNA without DNA cleavage” Nature 551, 464-471 (2017); and Komor, A. C., et al., “Improved base excision repair inhibition and bacteriophage Mu Gam protein yields C:G-to-T:A base editors with higher efficiency and product purity” Science Advances 3:eaao4774 (2017), the entire contents of which are hereby incorporated by reference.

[0961] In some embodiments, editing of a plurality of nucleobase pairs in one or more genes using the methods provided herein results in formation of at least one intended mutation. In some embodiments, the formation of the at least one intended mutation is in the splice acceptor 5′ of an exon of a disease-associated gene and results in disruption of splicing of the mRNA transcript of a disease-associated gene. It should be appreciated that multiplex editing can be accomplished using any method or combination of methods provided herein.

### Splice Acceptor Disruption

[0962] In some embodiments, the intended mutation is the targeting of an A nucleobase in a splice acceptor (having the conserved nucleotide sequence motif “AG”) with an adenosine base editor, e.g., ABE8, to cause disruption of mRNA splicing of a gene during transcription. In an embodiment, the splice acceptor targeted is the “AG” sequence motif located at the 3′ end of an intron and 5′ of exon 3 of the SOD1 gene associated with ALS. The intended mutation alters the conserved “AG” nucleotide sequence motif in the splice acceptor so as to cause splice disruption, and an alteration or loss of normal splicing of the mRNA transcript during transcription of the gene. In an embodiment, the deamination of the A nucleobase in the splice acceptor conserved motif with an A-to-G base editor (ABE) results in a splice acceptor sequence that disrupts normal mRNA splicing and results in an mRNA transcript, and, in some cases, a translated protein that is aberrant, e.g., truncated, fragmented, and/or nonfunction) to remedy or treat the disease or disorder. In some embodiments, the intended mutation is an A→G point mutation in the conserved nucleotide sequence motif “AG” of the splice acceptor. The A→G point mutation can be effected, for example, by targeting a CBE to the opposite strand and editing the complement C of the pathogenic G nucleobase. A base editor can be targeted to the nucleobase intended to be mutated or converted, or to the complement of the nucleobase intended to be mutated or converted. The nomenclature of the description of pathogenic or disease-causing mutations and other sequence variations are described in den Dunnen, J. T. and Antonarakis, S. E., “Mutation Nomenclature Extensions and Suggestions to Describe Complex Mutations: A Discussion.” Human Mutation 15:712 (2000), the entire contents of which is hereby incorporated by reference.

### Modification of the AR Gene

[0963] The introduction of a stop codon or disruption of a splice site in the first exon results in the premature termination of the AR polypeptide, thereby providing a new strategy for the treatment of subjects suffering from SBMA.

[0964] The present disclosure provides methods for the treatment of a subject diagnosed with SBMA. For example, in some embodiments, a method is provided that comprises administering to a subject having or having a propensity to develop SBMA, an effective amount of a nucleobase editor (e.g., an adenosine deaminase base editor or a cytidine deaminase base editor) that introduces a point mutation that results in the premature termination of the AR polypeptide.

[0965] It will be understood that the numbering of the specific positions or residues in the respective sequences, e.g., polynucleotide or amino acid sequences of a disease-related gene or its encoded protein, respectively, depends on the particular protein and numbering scheme used. Numbering can be different, e.g., in precursors of a mature protein and the mature protein itself, and differences in sequences from species to species can affect numbering. One of skill in the art will be able to identify the respective residue in any homologous protein and in the respective encoding nucleic acid by methods well known in the art, e.g., by sequence alignment and determination of homologous residues.

[0966] Provided herein are methods of using the base editor or base editor system for editing a nucleobase in a target AR nucleotide sequence associated with SBMA. In some embodiments, the activity of the base editor (e.g., comprising a cytidine deaminase and a Cas9 domain) results in the introduction of a point mutation.

[0967] In some embodiments, the deamination of an A results in the disruption of a splice site in an AR polypeptide. In some embodiments, the deamination of a C results in the introduction of a stop codon in an AR polypeptide. In some embodiments, the subject has been diagnosed with SBMA.

### Use of Nucleobase Editors to Target Nucleotides in the Gene Encoding the Androgen Receptor (AR)

[0968] The suitability of nucleobase editors that target a nucleotide in the gene encoding the androgen receptor is evaluated as described herein. In one embodiment, a single cell of interest is transfected, transduced, or otherwise modified with a nucleic acid molecule or molecules encoding a nucleobase editor described herein together with a small amount of a vector encoding a reporter (e.g., GFP). These cells can be immortalized human cell lines, such as 293T, K562 or U20S. Alternatively, primary human cells may be used. Cells may also be obtained from a subject or individual, such as from tissue biopsy, surgery, blood, plasma, serum, or other biological fluid. Such cells may be relevant to the eventual cell target.

[0969] Delivery may be performed using a viral vector as further described below. In one embodiment, transfection may be performed using lipid transfection (such as Lipofectamine or Fugene) or by electroporation. Following transfection, expression of GFP can be determined either by fluorescence microscopy or by flow cytometry to confirm consistent and high levels of transfection. These preliminary transfections can comprise different nucleobase editors to determine which combinations of editors give the greatest activity.

[0970] The activity of the nucleobase editor is assessed as described herein, i.e., by sequencing the target gene to detect alterations in the target sequence. For Sanger sequencing, purified PCR amplicons are cloned into a plasmid backbone, transformed, miniprepped and sequenced with a single primer. Sequencing may also be performed using next generation sequencing techniques. When using next generation sequencing, amplicons may be 300-500 bp with the intended cut site placed asymmetrically. Following PCR, next generation sequencing adapters and barcodes (for example Illumina multiplex adapters and indexes) may be added to the ends of the amplicon, e.g., for use in high throughput sequencing (for example on an Illumina MiSeq).

[0971] The fusion proteins that induce the greatest levels of target specific alterations in initial tests can be selected for further evaluation.

[0972] In other embodiments, the activity of the nucleobase editor is assessed by detecting the presence or absence of a full length AR polypeptide in cells that naturally or recombinantly express AR. Methods for detecting AR protein are known in the art and include, for example, immunoassay, ELISA, and Western blot.

[0973] In particular embodiments, the nucleobase editors are used to target polynucleotides of interest. In one embodiment, a nucleobase editor of the invention is delivered to cells (e.g., neurons) in conjunction with a guide RNA that is used to target a nucleic acid sequence, e.g., a polynucleotide encoding the androgen receptor to introduce a stop codon or disrupt a splice site in the gene, thereby disrupting the expression of the androgen receptor.

### Generating an Intended Mutation

[0974] The nucleobase editing proteins provided herein can be validated for gene editing-based human therapeutics in vitro, e.g., by introducing a stop codon or disrupting a splice site in the AR target gene in human cell culture. It will be understood by the skilled artisan that the nucleobase editing proteins provided herein, e.g., the fusion proteins comprising a polynucleotide programmable nucleotide binding domain (e.g., Cas9) and a nucleobase editing domain (e.g., an adenosine deaminase domain or a cytidine deaminase domain) can be used to introduce any single point A to G or C to T mutation.

[0975] In some embodiments, the present disclosure provides base editors that can efficiently generate an intended mutation, such as a point mutation, in a nucleic acid (e.g., a nucleic acid within a genome of a subject) without generating a significant number of unintended mutations, such as unintended point mutations. In some embodiments, an intended mutation is a mutation that is generated by a specific base editor (e.g., cytidine base editor or adenosine base editor) bound to a guide polynucleotide (e.g., gRNA), specifically designed to generate the intended mutation. In some embodiments, the intended mutation is an adenine (A) to guanine (G) point mutation that results in the disruption of a splice site. In some embodiments, the intended mutation is a cytosine (C) to thymine (T) point mutation that results in the introduction of a premature stop codon. In some embodiments, the intended mutation is an adenine (A) to guanine (G) point mutation within the coding region or non-coding region of a gene. In some embodiments, the intended mutation is a cytosine (C) to thymine (T) point mutation within the coding region or non-coding region of a gene.

[0976] In some embodiments, the intended mutation is a point mutation that generates a stop codon, for example, a premature stop codon within the coding region of a gene. In some embodiments, the intended mutation is a point mutation that disrupts a splice site within the coding region of a gene.

[0977] In some embodiments, any of the base editors provided herein are capable of generating a ratio of intended mutations to unintended mutations (e.g., intended point mutations:unintended point mutations) that is greater than 1:1. In some embodiments, any of the base editors provided herein are capable of generating a ratio of intended mutations to unintended mutations (e.g., intended point mutations:unintended point mutations) that is at least 1.5:1, at least 2:1, at least 2.5:1, at least 3:1, at least 3.5:1, at least 4:1, at least 4.5:1, at least 5:1, at least 5.5:1, at least 6:1, at least 6.5:1, at least 7:1, at least 7.5:1, at least 8:1, at least 10:1, at least 12:1, at least 15:1, at least 20:1, at least 25:1, at least 30:1, at least 40:1, at least 50:1, at least 100:1, at least 150:1, at least 200:1, at least 250:1, at least 500:1, or at least 1000:1, or more.

[0978] Details of base editor efficiency are described in International PCT Application Nos. PCT/2017/045381 (WO2018/027078) and PCT/US2016/058344 (WO2017/070632), each of which is incorporated herein by reference for its entirety. Also see Komor, A. C., et al., “Programmable editing of a target base in genomic DNA without double-stranded DNA cleavage” Nature 533, 420-424 (2016); Gaudelli, N. M., et al., “Programmable base editing of A⋅T to G⋅C in genomic DNA without DNA cleavage” Nature 551, 464-471 (2017); and Komor, A. C., et al., “Improved base excision repair inhibition and bacteriophage Mu Gam protein yields C:G-to-T:A base editors with higher efficiency and product purity” Science Advances 3:eaao4774 (2017), the entire contents of which are hereby incorporated by reference.

[0979] In some embodiments, the editing of the plurality of nucleobase pairs in one or more genes result in formation of at least one intended mutation. In some embodiments, the formation of the at least one intended mutation results in the introduction of a premature stop codon or the disruption of a splice site. It should be appreciated that the characteristics of the multiplex editing of the base editors as described herein can be applied to any of combination of the methods of using the base editor provided herein.

### III. Applications for Multi-Effector Nucleobase Editors

[0980] The multi-effector nucleobase editors can be used to target polynucleotides of interest to create alterations that modify protein expression. In one embodiment, a multi-effector nucleobase editor is used to modify a non-coding or regulatory sequence, including but not limited to splice sites, enhancers, and transcriptional regulatory elements. The effect of the alteration on the expression of a gene controlled by the regulatory element is then assayed using any method known in the art. In a particular embodiment, a multi-effector nucleobase editor is able to substantially alter a regulatory sequence, thereby abolishing its ability to regulate gene expression. Advantageously, this can be done without generating double-stranded breaks in the genomic target sequence, in contrast to other RNA-programmable nucleases.

[0981] The multi-effector nucleobase editors can be used to target polynucleotides of interest to create alterations that modify protein activity. In the context of mutagenesis, for example, multi-effector nucleobase editors have a number of advantages over error-prone PCR and other polymerase-based methods. Because multi-effector nucleobase editors of the invention create alterations at multiple bases in a target region, such mutations are more likely to be expressed at the protein level relative to mutations introduced by error-prone PCR, which are less likely to be expressed at the protein level given that a single nucleotide change in a codon may still encode the same amino acid (e.g., codon degeneracy). Unlike error-prone PCR, which induces random alterations throughout a polynucleotide, multi-effector nucleobase editors of the invention can be used to target specific amino acids within a small or defined region of a protein of interest.

[0982] In other embodiments, a multi-effector nucleobase editor of the invention is used to target a polynucleotide of interest within the genome of an organism. In one embodiment, the organism is a bacteria of the microbiome (e.g., Bacteriodetes, Verrucomicrobia, Firmicutes; Gammaproteobacteria, Alphaproteobacteria, Bacteriodetes, Clostridia, Erysipelotrichia, Bacilli; Enterobacteriales, Bacteriodales, Verrucomicrobiales, Clostridiales, Erysiopelotrichales, Lactobacillales; Enterobacteriaceae, Bacteroidaceae, Erysiopelotrichaceae, Prevotellaceae, Coriobacteriaceae, and Alcaligenaceae, Escherichia, Bacteroides, Alistipes, Akkermansia, Clostridium, Lactobacillus). In another embodiment, the organism is an agriculturally important animal (e.g., cow, sheep, goat, horse, chicken, turkey) or plant (e.g., soybeans, wheat, corn, rice, tobacco, apples, grapes, peaches, plums, cherries). In one embodiment, a multi-effector nucleobase editor of the invention is delivered to cells in conjunction with a library of guide RNAs that are used to tile a variety of sequences within the genome of a cell, thereby systematically altering sequences throughout the genome.

[0983] Mutations may be made in any of a variety of proteins to facilitate structure function analysis or to alter the endogenous activity of the protein. Mutations may be made, for example, in an enzyme (e.g., kinase, phosphatase, carboxylase, phosphodiesterase) or in an enzyme substrate, in a receptor or in its ligand, and in an antibody and its antigen. In one embodiment, a multi-effector nucleobase editor targets a nucleic acid molecule encoding the active site of the enzyme, the ligand binding site of a receptor, or a complementarity determining region (CDR) of an antibody. In the case of an enzyme, inducing mutations in the active site could increase, decrease, or abolish the enzyme's activity. The effect of mutations on the enzyme is characterized in an enzyme activity assay, including any of a number of assays known in the art and/or that would be apparent to the skilled artisan. In the case of a receptor, mutations made at the ligand binding site could increase, decrease or abolish the receptors affinity for its ligand. The effect of such mutations is assayed in a receptor/ligand binding assay, including any of a number of assays known in the art and/or that would be apparent to the skilled artisan. In the case of a CDR, mutations made within the CDR could increase, decrease or abolish binding to the antigen. Alternatively, mutations made within the CDR could alter the specificity of the antibody for the antigen. The effect of these alterations on CDR function is then assayed, for example, by measuring the specific binding of the CDR to its antigen or in any other type of immunoassay.

### Diseases and Disease-Associated Genes

[0984] Provided herein are systems, compositions and methods for disrupting splicing during transcription of a disease-causing or a disease-associated gene by using a programmable base editor or programmable base editor system as described herein to target and edit a nucleobase in the conserved “AG” nucleic acid motif of the splice acceptor in the non-coding nucleic acid sequence 5′ of an exon of a disease-associated or disease-causing gene sequence. The activity of the base editor (e.g., comprising an adenosine deaminase and a Cas9 domain) causes an alteration and disruption of the canonical splice acceptor motif, thus resulting in a change in the splice acceptor sequence compared to a wild-type splice acceptor and disruption of normal splicing of mRNA during transcription of the disease-associated or disease-associated gene. In some embodiments, the deamination of the A nucleobase in the splice acceptor results in splice disruption of an mRNA transcript.

[0985] In some embodiments, the adenosine nucleotide of the canonical AG splice acceptor nucleic acid sequence 5′ of an exon of a gene sequence associated with being causative of a disease or disorder is deaminated to result in a guanosine nucleotide, thereby altering the canonical AG splice acceptor such that splicing is disrupted, or the ability of normal splicing to occur is lost, during transcription of the gene. By way of example, an alternatively spliced gene transcript may result, and translation and production of a normal or full-length, functional protein product is adversely affected, such that a truncated and/or nonfunctional protein product is produced. In an embodiment, the disease-associated or disease-causing gene is the superoxide dismutase 1 (SOD1) gene, which is associated with Amyotrophic Lateral Sclerosis (ALS). In an embodiment, an adenosine to guanosine (A to G) change is effected in the canonical AG motif of the splice acceptor nucleotide sequence 5′ of the exon 3 nucleic acid sequence of the SOD1 gene. In some embodiments, the subject is a human patient who has ALS, or has been diagnosed with ALS.

[0986] The present invention also features compositions and methods for treating spinal and bulbar muscular atrophy (SBMA) by modifying a gene encoding the androgen receptor. In some embodiments, the modification generates a stop codon or disrupts a splice site in exon 1. In other embodiments, the modification disrupts a splice site (e.g., splice donor site or splice acceptor site). The invention is based, at least in part, on the discovery that an Adenosine Base Editor (ABE) can be used to deaminate an adenosine in exon 1 of the androgen receptor (AR) gene, which change disrupts a splice donor or a splice acceptor site, thereby disrupting expression of an AR polypeptide having a trinucleotide repeat expansion associated with SBMA.

### Amyotrophic Lateral Sclerosis and Superoxide Dismutase 1 (SOD1)

[0987] Amyotrophic lateral sclerosis (ALS) is a progressive neurodegenerative disease that affects nerve cells (neurons) in the brain and spinal cord. ALS is characterized by the death of motor neurons in the brainstem and spinal cord, leading to progressive paralysis and eventually to patient death. Lou Gehrig, the notable New York Yankees baseball player, was afflicted with ALS and brought national and international attention to the disease in 1939; to this day, the disease is still closely associated with his name. ALS usually strikes people in mid-life, between 40 and 70 years of age; however, others can also develop the disease. While the number may fluctuate, it is estimated that about 30,000 patients in this country have the disease, and about 5,000 are diagnosed with ALS every year.

[0988] Motor neurons extend from the brain to the spinal cord and from the spinal cord to the muscles throughout the body. The progressive degeneration of the motor neurons in ALS eventually leads to cell death and muscle atrophy. When the motor neurons die, the ability of the brain to initiate and control muscle movement is lost. Patients in the later stages of the disease may become totally paralyzed as a result of progressive paralysis of voluntary muscle action.

[0989] In general, ALS is classified into two different types, sporadic and familial. Sporadic ALS (sALS; ALS incidences of unknown cause) is the most common form of the disease in the United States and accounts for 90 to 95 percent of all cases of the disease. Familial ALS (fALS) is inherited and accounts for 5 to 10 percent of all cases in the U.S. fALS are caused by mutations in a number of genes in a dominant manner. The most thoroughly studied forms of fALS are caused by mutations in the gene encoding the copper-zinc (Cu/Zn) superoxide dismutase (SOD1) that result in changes to the protein's primary structure and account for 10-15% of all fALS cases.

[0990] SOD1 is an abundant antioxidant enzyme that catalyzes the disproportionation of superoxide to hydrogen peroxide (H₂O₂) and dioxygen. In humans, the SOD1 gene is located at position 22.11 on the long arm of chromosome 21. The human SOD1 enzyme is a 32-kDa homodimer with one copper- and one zinc-binding site and one intramolecular disulfide bond per subunit. More than 200 ALS-associated mutations in the SOD1 gene have been identified, most of which are genetically dominant. All fALS SOD1 mutations result in primary structure changes that are scattered widely throughout the 153-residue SOD1 polypeptide. Such mutations are predominantly single amino-acid residue substitutions, although insertions, deletions, and truncations of the C terminus are also known. Besides humans, the only other mammalian species known to develop ALS-like symptoms and histopathology naturally are dogs, and an association between the disease in dogs (canine degenerative myelopathy) and a mutation in the SOD1 gene has been discovered. (Y. Sheng et al., 2012, Current Topics in Medicinal Chemistry, 12:2560-2572). Many SOD1 variants display normal enzymatic activity, and SOD1-knockout mice do not show motor neuron death, thus indicating that SOD1-linked fALS is not a loss-of-function disorder. That transgenic mice expressing ALS-causing human SOD1 variants in addition to endogenous wild-type (WT) mouse SOD1 developed ALS-like neurodegeneration and paralysis led to the conclusion that mutant SOD1 causes ALS disease through acquisition of toxic properties. Proteinaceous inclusions immunoreactive for SOD1 have been found in spinal cords from fALS-SOD1 patients and transgenic mice. Consequently, aggregation of SOD1 is believed to underlie the etiology of SOD1-linked fALS.

[0991] Mutant SOD1 is postulated to oligomerize by itself or with other intracellular components to form high molecular weight aggregates (soluble oligomers or insoluble aggregates). ALS-associated mutant SOD1 variants all show a higher aggregation propensity compared with the human WT (hWT) enzyme; however, the destabilization of the SOD1 polypeptide is not a feature shared by all SOD1 mutant proteins. Posttranslational modifications of SOD1, including binding of the Zn and Cu cofactors and formation of the disulfide bond, contribute greatly to the stability of SOD1. The role of metallation states and disulfide status in SOD1 aggregation, which likely involves immature or misfolded forms of SOD1, has been addressed by Y. Sheng et al., (2012, Current Topics in Medicinal Chemistry, 12:2560-2572).

[0992] ALS is a heterogeneous disease, as there are many diverse ways that disease can occur. There are many different types of ALS, which are distinguished by their signs and symptoms and their genetic cause or lack of clear genetic association. Most people with sporadic ALS often present with characteristics of the condition in their late fifties or early sixties, without apparent warning. A small proportion (approximately 5-10%) of people with fALS have a family history of ALS or a related condition called frontotemporal dementia (FTD), a progressive brain disorder that affects personality, behavior, and language. The signs and symptoms of fALS typically first appear in individuals in their late forties or early fifties. Symptoms of a rare form of ALS, called juvenile ALS, develop in childhood or teenage years

[0993] The first signs and symptoms of ALS are often subtle and may be overlooked. The earliest ALS symptoms include muscle twitching, cramping, stiffness, or weakness. Affected individuals may develop slurred speech (dysarthria) and, later, difficulty chewing or swallowing (dysphagia). Many ALS patients experience malnutrition because of reduced food intake due to dysphagia and an increase in their body's energy demands (metabolism) due to prolonged illness. Muscles become weaker as the disease progresses, and arms and legs begin to look thinner as muscle tissue atrophies. Individuals affected with ALS eventually lose muscle strength and the ability to walk; thus, they become wheelchair-dependent. Over time, muscle weakness causes ALS patients to lose the use of their hands and arms. Because of the weakening of muscles in the respiratory system, patients with ALS experience breathing difficulties and often succumb to the disease as a result of respiratory failure within 2 to 10 years after the signs and symptoms of ALS first appear. Nonetheless, disease progression varies widely among affected individuals. Approximately 20 percent of ALS patients also develop FTD. Changes in personality and behavior may make it difficult for affected individuals to interact with others in a socially appropriate manner. Communication skills worsen as the disease progresses. While it is unclear how ALS and FTD are related, individuals who develop both conditions are diagnosed as having ALS-FTD.

[0994] ALS-provoking SOD1 mutations produce a common shift of the folding equilibrium of the SOD1 protein toward unfolded and partly folded monomers, implicating that a noxious side reaction emerges from the early folding events. The conformational repertoire of the apoSOD monomer has been mapped through analysis of the folding behavior of the protein. The results of the analysis allowed targeting of the regions of the SOD structure that are most susceptible to unfolding locally under physiological conditions, leading to the exposure of structurally promiscuous interfaces that are normally hidden in the protein's interior and confirmed other findings that the immature apoSOD monomer is a precursor for cytotoxicity. (A. Nordlund and M. Oliveberg, 2006; Proc. Natl. Acad. Sci. USA.; 103(27):10218-10223). Accompanying the shift of the folding equilibrium, the ALS-associated SOD mutations indicate a quantitative relation between decreased protein stability, net charge, and disease progression. Taken together, these data suggest a disease mechanism that, at least in the familial form of ALS, is linked to protein aggregation or other associative processes triggered by ruptured structure and decreased repulsive charge, for example, overloading of the molecular chaperons and adverse conglomeration with membrane lipids. (Id.).

[0995] At present, ALS has no cure. Treatments for ALS include drugs that address and slow the progression of disease symptoms, such as controlling spasicity, pain, and swallowing functions. Drugs such as Riluzole (Rilutek), which may reduce the higher levels of glutamate in the brains of ALS patients, and Edaravone (Radicava), which may reduce the decline in daily functioning associated with ALS, have slowed or reduced disease progression in some patients, but not in all patients for sustained periods of time.

[0996] To date, existing drugs, therapies and strategies for the treatment of ALS have been met with limited success. Therefore, there is a profound need for novel compositions and methods for treating patients with ALS and reducing, ameliorating and/or alleviating the symptoms and devastating debilitation associated with the disease.

### Spinal and Bulbar Muscular Atrophy and Androgen Receptor (AR)

[0997] Spinal and bulbar muscular atrophy (SBMA, also known as Kennedy's disease) is an X-linked, adult onset motor neuron disease characterized by progressive weakness of the bulbar and extremity muscles. SBMA patients experience weakness in their facial muscles, difficulty swallowing, and are wheelchair bound 20-30 years after onset of the disease. SBMA is a member of the family of CAG-polyglutamine expansion diseases that includes Huntington's disease and seven spinocerebellar ataxias. The length of the CAG expansion correlates inversely with age of disease onset, i.e., the longer the expansion the earlier the onset. In SBMA, CAG repeat length also correlates with motor and sensory nerve conduction abnormalities.

[0998] The SBMA repeat expansion is in the first exon of the androgen receptor (AR) gene. The androgen receptor is a nuclear receptor that normally regulates gene expression after ligand binding. In humans, heterozygous female carriers of the disease gene are generally asymptomatic, and even homozygous females have only mild symptoms. SBMA disease manifestations are due to a ligand-dependent toxic gain of function in the mutant androgen receptor. To date, no effective therapies for SBMA are available. Therefore, there is a need for a method of treating patients with SBMA that prevents or ameliorates the progressive loss of neurological function.

### Splice Acceptor Base Editing and Exon Splicing

[0999] Featured herein are base editor systems and methods of use thereof comprising a deaminase, e.g., an adenosine deaminase, such as ABE8, or a cytidine deaminase, as described herein, for mutating one or more target nucleotides (DNA bases) within a splice acceptor associated with an exon of a disease-associated gene or a disease-causing gene, such as the SOD1 gene or a mutated form thereof that is associated with ALS. By editing a nucleobase in the splice acceptor of a disease-associated gene, the base editor systems and methods described herein modulate gene splicing, a critical biological process by which pre-messenger RNA (pre-mRNA) matures through removal of intronic sequences, thereby resulting in the juxtaposition of exons to form mature transcripts prior to translation into mature protein. The splice acceptor (or splice acceptor site) is known in the art as the canonical nucleotide sequence “AG,” which is situated at the 3′ end of an intron nucleic acid sequence and 5′ of an exon (exon nucleic acid sequence) of a gene. In an embodiment, the gene is SOD1, which encodes the SOD1 enzymatic protein. In an embodiment, the exon is exon 3 of the SOD1 gene, and the splice acceptor AG is proximal to the 5′ end of exon 3 of the SOD1 gene. (FIG. 2).

[1000] RNA splicing is a form of RNA processing in which a newly-made precursor messenger RNA (pre-mRNA) transcript is converted to a mature messenger RNA (mRNA). During splicing, introns (non-coding nucleic acid sequences in genomic DNA or genes) are removed and exons (gene coding region nucleic acid sequences) are juxtaposed together. For nuclear-encoded genes, splicing takes place within the nucleus either during or immediately after transcription. For eukaryotic genes that contain introns, splicing is usually required in order to create a mature mRNA molecule that can be translated into protein. For many eukaryotic introns, splicing is carried out in a series of reactions catalyzed by the spliceosome, i.e., a complex of small nuclear ribonucleoproteins (snRNPs). The assembly and activity of the spliceosome occur during transcription of the pre-mRNA. The RNA components of snRNPs interact with the intron and are involved in catalysis. Self-splicing introns, or ribozymes capable of catalyzing their own excision from their parent RNA molecule, also exist.

[1001] An essential step during exon splicing is the recognition by the spliceosome machinery of the highly conserved nucleic acid sequences that define exons and introns. More specifically, the 5′ end of nearly every intron preceding an exon of a gene begins with a canonical or consensus “GT” nucleic acid sequence (called a “donor sequence”) and ends with a canonical or consensus “AG” nucleic acid sequence (called an “acceptor sequence”); these donor and acceptor nucleic acid sequences (sites) are involved in gene transcription and recognition by protein complexes (splicesosomes) that splice-out introns, resulting in the juxtaposition of the exons of a gene to produce a complete gene transcript. In accordance with the systems and methods described herein, a mutation that disrupts the “AG” nucleic acid sequence within the splice acceptor site of an exon in genomic DNA can result in improper splicing by the requisite proteins, such that normal transcription of one or more exons is also disrupted, thereby preventing the incorporation of the exon into mature transcripts of the gene in some cases. In an embodiment, the adenosine of the target “AG” acceptor sequence is effectively converted to guanosine by the base editor systems and methods as described herein, which produces an aberrant acceptor sequence and causes disruption of mRNA splicing. A variation in the consensus splice acceptor sequence may cause insertion or deletion of amino acids, or a disruption of the reading frame of the mRNA, which is eventually translated into protein.

[1002] In a particular embodiment, the base editing systems and methods described herein mutate in a precise fashion a nucleobase in the AG splice acceptor 5′ of exon 3 of the SOD1 gene, which is associated with ALS, thereby causing splice disruption during transcription of the gene. This, in turn, results in a altered or alternative SOD1 transcription product (gene transcript) and, ultimately, in a disrupted SOD1 gene product leading to, for example, a truncated SOD1 protein, relative to a full-length, undisrupted gene product. As the pre-mRNA transcript is processed, disrupted or alternative splicing can result in certain exons of a gene being improperly transcribed and/or excluded from the mature transcripts. Under normal circumstances, alternative splicing provides temporal and tissue-specific control over which protein isoform is expressed and, therefore, plays a key role in biological complexity and development. The molecular editing of a splice acceptor leading to alternative splicing as provided by the base editing systems and methods described herein offers an advantageous molecular tool in which gene transcription can be selectively disrupted, and certain exons of a gene, in some cases, mutation-containing exons, are specifically avoided or precluded from mature transcripts. The resultant protein may have diminished function or no function. In some embodiments, the alternative transcripts generated by the splice disruption described herein may be degraded, or may lead to fragments or shortened proteins that are themselves degraded by cellular machinery.

[1003] The systems and methods described herein are useful for affecting gene splicing and modulating the balance of one or more gene products encoded by a given gene. The polynucleotide programmable DNA base editor systems and methods described herein achieve the disruption of transcript splicing by the precise mutation of a splice acceptor 5′ of a selected exon of a gene by specifically targeting the splice acceptor site and introducing a change in the genomic DNA (gDNA) of the exon to alter the gDNA. In an embodiment, the gene is the SOD1 gene that encodes a SOD1 enzyme whose toxic overexpression in motor neuron cells is associated with ALS. The coding sequence of the human SOD1 gene contains 5 exons, which are delineated in the SOD1 genomic sequence as follows: exon 1 encompasses nucleotides 149-220; exon 2 encompasses nucleotides 4169 to 4265; exon 3 encompasses nucleotides 6828 to 6897; exon 4 encompasses nucleotides 7637 to 7754; and exon 5 encompasses nucleotides 8850 to 8957 of the SOD1 genomic polynucleotide sequence.

[1004] In an embodiment, the “A” nucleotide of the “AG” nucleic acid splice acceptor site located 5′ of exon 3 of the SOD1 gene is targeted and precisely converted to a “G” nucleotide by a deaminase of the system. In an embodiment, the deaminase is an adenosine deaminase. In an embodiment, the adenosine deaminase is ABE8. In embodiments, the ABE8 is ABE8.1-ABE8.14, or ABE7.10 as described herein. In an embodiment, the “A” nucleotide of the “AG” nucleic acid splice acceptor located 5′ of exon 1 of the SOD1 gene is targeted to disrupt splicing of the SOD1 transcript. In an embodiment, the “A” nucleotide of the “AG” nucleic acid splice acceptor located 5′ of exon 2 of the SOD1 gene is targeted to disrupt splicing of the SOD1 transcript. In an embodiment, the “A” nucleotide of the “AG” nucleic acid splice acceptor located 5′ of exon 4 of the SOD1 gene is targeted to disrupt splicing of the SOD1 transcript. In an embodiment, the “A” nucleotide of the “AG” nucleic acid splice acceptor located 5′ of exon 5 of the SOD1 gene is targeted to disrupt splicing of the SOD1 transcript.

### Methods of Treatment

[1005] Provided also are methods of treating a disease or condition and/or the genetic mutations that cause the disease or condition. These methods comprise administering to a subject (e.g., a mammal, such as a human) a therapeutically effective amount of a pharmaceutical composition that comprises a polynucleotide encoding a base editor system (e.g., base editor and gRNA) described herein. In some embodiments, the base editor is a fusion protein that comprises a napDNAbp domain and an adenosine deaminase domain or a cytidine deaminase domain. A cell of the subject is transduced with the base editor and one or more guide polynucleotides that target the base editor to effect an A⋅T to G⋅C alteration (if the cell is transduced with an adenosine deaminase domain) or a C⋅G to U⋅A alteration (if the cell is transduced with a cytidine deaminase domain) of a nucleic acid sequence containing mutations in a gene of interest.

[1006] The methods herein include administering to the subject (including a subject identified as being in need of such treatment, or a subject suspected of being at risk of disease and in need of such treatment) an effective amount of a composition described herein. Identifying a subject in need of such treatment can be in the judgment of a subject or a health care professional and can be subjective (e.g., opinion) or objective (e.g., measurable by a test or diagnostic method).

[1007] The therapeutic methods, in general, comprise administration of a therapeutically effective amount of a pharmaceutical composition comprising, for example, a vector encoding a base editor and a gRNA that targets the gene of interest of a subject (e.g., a human patient) in need thereof. Such treatment will be suitably administered to a subject, particularly a human subject, suffering from, having, susceptible to, or at risk for the disease or condition.

[1008] In one embodiment, the invention provides a method of monitoring treatment progress is provided. The method includes the step of determining a level of diagnostic marker (Marker) (e.g., SNP associated with the disease or condition) or diagnostic measurement (e.g., screen, assay) in a subject suffering from or susceptible to a disease, disorder, or symptoms thereof in which the subject has been administered a therapeutic amount of a composition herein sufficient to treat the disease or symptoms thereof. The level of Marker determined in the method can be compared to known levels of Marker in either healthy normal controls or in other afflicted patients to establish the subject's disease status. In preferred embodiments, a second level of Marker in the subject is determined at a time point later than the determination of the first level, and the two levels are compared to monitor the course of disease or the efficacy of the therapy. In certain preferred embodiments, a pre-treatment level of Marker in the subject is determined prior to beginning treatment according to this invention; this pre-treatment level of Marker can then be compared to the level of Marker in the subject after the treatment commences, to determine the efficacy of the treatment.

[1009] In some embodiments, cells are obtained from the subject and contacted with a pharmaceutical composition as provided herein. In some embodiments, cells removed from a subject and contacted ex vivo with a pharmaceutical composition are re-introduced into the subject, optionally after the desired genomic modification has been effected or detected in the cells. Methods of delivering pharmaceutical compositions comprising nucleases are described, for example, in U.S. Pat. Nos. 6,453,242; 6,503,717; 6,534,261; 6,599,692; 6,607,882; 6,689,558; 6,824,978; 6,933,113; 6,979,539; 7,013,219; and 7,163,824, the disclosures of all of which are incorporated by reference herein in their entireties. Although the descriptions of pharmaceutical compositions provided herein are principally directed to pharmaceutical compositions that are suitable for administration to humans, it will be understood by the skilled artisan that such compositions are generally suitable for administration to animals or organisms of all sorts, for example, for veterinary use.

[1010] Provided herein are methods of treating a disease or disorder with a composition or system, e.g., a base editor system or a base editor protein, described herein. Optionally, the base editor system described herein can be combined with one or more other treatments. In one aspect, provided herein is a method of treating Amyotrophic Lateral Sclerosis (ALS) in a subject in need thereof by administering a base editor described herein. In one aspect, provided herein is a method of treating Spinal and bulbar muscular atrophy (SBMA) in a subject in need thereof by administering a base editor described herein.

[1011] The response in individual subjects can be characterized as a complete response, a partial response, or stable disease. In some embodiments, the response is a partial response (PR). In some embodiments, the response is a complete response (CR). In some embodiments, the response results in progression-free survival of the subject (e.g., stable disease).

[1012] In some embodiments, the treatment results in an increased survival time of the human subject as compared to the expected survival time of the human subject if the human subject was not treated with the compound.

[1013] In some embodiments, the human subject to be treated with the described methods is a child (e.g., 0-18 years of age). In other embodiments, the human subject to be treated with the described methods is an adult (e.g., 18+ years of age).

### Methods of Treating Amyotrophic Lateral Sclerosis (ALS)

[1014] Provided herein are methods of treating Amyotrophic Lateral Sclerosis (ALS) and its symptoms by precise base editing of the conserved splice acceptor site in an intron of a gene associated with ALS, such as the superoxide dismutase 1 (SOD1) gene, so as to disrupt or inactivate normal splicing-out of intronic sequences between exons of the SOD1 gene in a subject, e.g., a mammalian subject or a human subject, thereby disrupting or inhibiting normal splicing during transcription of the exons of the SOD1 gene, and, in turn, producing an abnormal and/or nonfunctional, e.g., truncated, SOD1 enzyme. Splice disruption can reduce or eliminate normal or functional expression of the SOD1 enzyme encoded by the SOD1 gene in motor neurons of the subject. In an embodiment, the subject is a human patient. In a particular embodiment, the subject is a human patient afflicted with ALS. The method involves administering to a subject (e.g., a mammal, such as a human or a human having ALS) a therapeutically effective amount of a pharmaceutical composition that comprises a polynucleotide encoding a base editor system (e.g., a base editor and gRNA) described herein. In some embodiments, the base editor is a fusion protein that comprises a polynucleotide programmable DNA binding domain and an adenosine deaminase domain. In some embodiments, the base editor is a fusion protein that comprises a polynucleotide programmable DNA binding domain and a cytidine deaminase domain. A cell, e.g., a motor neuron or CNS cell, of the subject is transduced with the base editor and one or more guide polynucleotides that target the base editor to effect an A to G alteration (if the cell is transduced with an adenosine deaminase domain) or a C to U alteration (if the cell is transduced with a cytidine deaminase domain) of an intronic nucleic acid sequence containing a splice acceptor sequence (AG) which is situated 5′ of the exon nucleic acid sequence of the gene, such as the splice acceptor sequence that resides 5′ of exon 3 of the SOD1 gene as described in Example 1 herein.

[1015] The methods herein include administering to the subject (including a subject identified as being in need of such treatment, or a subject suspected of being at risk of disease and in need of such treatment) an effective amount of a composition described herein. Identifying a subject in need of such treatment can be in the judgment of a subject or a health care professional and can be subjective (e.g., opinion) or objective (e.g., measurable by a test or diagnostic method).

[1016] The therapeutic methods, in general, comprise administration of a therapeutically effective amount of a pharmaceutical composition comprising, for example, a vector encoding a base editor and a gRNA that targets the splice acceptor site adjacent to (5′ of) an exon of a disease-associated or a disease-causing gene, e.g., exon 3 of the SOD1 gene of a subject (e.g., a human patient) in need thereof. Such treatment will be suitably administered to a subject, particularly a human subject, suffering from, having, susceptible to, or at risk for ALS. The compositions herein may be also used in the treatment of any other disorders in which ALS may be implicated.

[1017] In one embodiment, methods of monitoring treatment progress are provided. The method includes the step of determining a level of a diagnostic marker (Marker) (e.g., a SNP associated with ALS) or diagnostic measurement (e.g., screen, assay) in a subject suffering from or susceptible to a disorder or symptoms thereof associated with ALS in which the subject has been administered a therapeutic amount of a composition herein sufficient to treat the disease or symptoms thereof. The level of Marker determined in the method can be compared to known levels of Marker in either healthy normal controls or in other afflicted patients to establish the subject's disease status. In preferred embodiments, a second level of Marker in the subject is determined at a time point later than the determination of the first level, and the two levels are compared to monitor the course of disease or the efficacy of the therapy. In certain preferred embodiments, a pre-treatment level of Marker in the subject is determined prior to beginning treatment according to this invention; this pre-treatment level of Marker can then be compared to the level of Marker in the subject after the treatment commences, to determine the efficacy of the treatment.

[1018] In some embodiments, cells, such as motor neuron cells or CNS cells, are obtained from the subject and contacted with a pharmaceutical composition as provided herein. In some embodiments, cells removed from a subject and contacted ex vivo with a pharmaceutical composition are re-introduced into the subject, optionally after the desired genomic modification has been affected or detected in the cells. Methods of delivering pharmaceutical compositions comprising nucleases are described, for example, in U.S. Pat. Nos. 6,453,242; 6,503,717; 6,534,261; 6,599,692; 6,607,882; 6,689,558; 6,824,978; 6,933,113; 6,979,539; 7,013,219; and 7,163,824, the disclosures of all of which are incorporated by reference herein in their entireties. Although the descriptions of pharmaceutical compositions provided herein are principally directed to pharmaceutical compositions which are suitable for administration to humans, it will be understood by the skilled artisan that such compositions are generally suitable for administration to animals or organisms of all sorts, for example, for veterinary use.

[1019] The subject may exhibit an improvement in one or more of the symptoms of ALS. In one embodiment, the improvement in one or more of the symptoms is at least 5%. In another embodiment, the improvement in one or more of the symptoms is at least 10%. In another embodiment, the improvement in one or more of the symptoms is at least 15%. In another embodiment, the improvement in one or more of the symptoms is at least 20%. In another embodiment, the improvement in one or more of the symptoms is at least 25%. In another embodiment, the improvement in one or more of the symptoms is at least 30%. In another embodiment, the improvement in one or more of the symptoms is at least 35%. In another embodiment, the improvement in one or more of the symptoms is at least 40%. In another embodiment, the improvement in one or more of the symptoms is at least 50%. In another embodiment, the improvement in one or more of the symptoms is at least 60%. In another embodiment, the improvement in one or more of the symptoms is at least 70%. In another embodiment, the improvement in one or more of the symptoms is at least 75%. In another embodiment, the improvement in one or more of the symptoms is at least 80%. In another embodiment, the improvement in one or more of the symptoms is at least 85%. In another embodiment, the improvement in one or more of the symptoms is at least 90%. In another embodiment, the improvement in one or more of the symptoms is at least 95%.

### Methods of Treating Spinal and Bulbar Muscular Atrophy (SBMA)

[1020] Provided also are methods of treating SBMA that comprise administering to a subject (e.g., a mammal, such as a human) a therapeutically effective amount of a pharmaceutical composition that comprises a polynucleotide encoding a base editor system (e.g., base editor and gRNA) described herein. In some embodiments, the base editor is a fusion protein that comprises a polynucleotide programmable DNA binding domain and an adenosine deaminase domain or a cytidine deaminase domain. A cell of the subject is transduced with the base editor and one or more guide polynucleotides that target the base editor to effect an A⋅T to G⋅C alteration (if the cell is transduced with an adenosine deaminase domain) or a C⋅G to U⋅A alteration (if the cell is transduced with a cytidine deaminase domain) of a nucleic acid sequence containing mutations in the AR gene.

[1021] The methods herein include administering to the subject (including a subject identified as being in need of such treatment, or a subject suspected of being at risk of disease and in need of such treatment) an effective amount of a composition described herein. Identifying a subject in need of such treatment can be in the judgment of a subject or a health care professional and can be subjective (e.g., opinion) or objective (e.g., measurable by a test or diagnostic method).

[1022] The therapeutic methods, in general, comprise administration of a therapeutically effective amount of a pharmaceutical composition comprising, for example, a vector encoding a base editor and a gRNA that targets a mutant AR gene comprising a trinucleotide repeat expansion of a subject (e.g., a human patient) in need thereof. Such treatment will be suitably administered to a subject, particularly a human subject, suffering from, having, susceptible to, or at risk for SBMA. The compositions herein may be also used in the treatment of any other disorders in which trinucleotide repeat expansions in AR may be implicated.

[1023] In one embodiment, a method of monitoring treatment progress is provided. The method includes the step of determining a level of diagnostic marker (Marker) (e.g., AR polypeptide levels) or diagnostic measurement (e.g., screen, assay) in a subject suffering from or susceptible to a disorder or symptoms thereof associated with SBMA in which the subject has been administered a therapeutic amount of a composition herein sufficient to treat the disease or symptoms thereof. The level of Marker determined in the method can be compared to known levels of Marker in either healthy normal controls or in other afflicted patients to establish the subject's disease status. In preferred embodiments, a second level of Marker in the subject is determined at a time point later than the determination of the first level, and the two levels are compared to monitor the course of disease or the efficacy of the therapy. In certain preferred embodiments, a pre-treatment level of Marker in the subject is determined prior to beginning treatment according to this invention; this pre-treatment level of Marker can then be compared to the level of Marker in the subject after the treatment commences, to determine the efficacy of the treatment.

[1024] The subject may exhibit an improvement in one or more of the symptoms of SBMA. In one embodiment, the improvement in one or more of the symptoms is at least 5%. In another embodiment, the improvement in one or more of the symptoms is at least 10%. In another embodiment, the improvement in one or more of the symptoms is at least 15%. In another embodiment, the improvement in one or more of the symptoms is at least 20%. In another embodiment, the improvement in one or more of the symptoms is at least 25%. In another embodiment, the improvement in one or more of the symptoms is at least 30%. In another embodiment, the improvement in one or more of the symptoms is at least 35%. In another embodiment, the improvement in one or more of the symptoms is at least 40%. In another embodiment, the improvement in one or more of the symptoms is at least 50%. In another embodiment, the improvement in one or more of the symptoms is at least 60%. In another embodiment, the improvement in one or more of the symptoms is at least 70%. In another embodiment, the improvement in one or more of the symptoms is at least 75%. In another embodiment, the improvement in one or more of the symptoms is at least 80%. In another embodiment, the improvement in one or more of the symptoms is at least 85%. In another embodiment, the improvement in one or more of the symptoms is at least 90%. In another embodiment, the improvement in one or more of the symptoms is at least 95%.

### Pharmaceutical Compositions

[1025] Other aspects of the present disclosure relate to pharmaceutical compositions comprising any of the base editors, fusion proteins, or the fusion protein-guide polynucleotide complexes described herein. In some embodiments, the pharmaceutical composition further comprises a pharmaceutically acceptable carrier. In some embodiments, the pharmaceutical composition comprises additional agents (e.g., for specific delivery, increasing half-life, or other therapeutic compounds).

[1026] Suitable pharmaceutically acceptable carriers generally comprise inert substances that aid in administering the pharmaceutical composition to a subject, aid in processing the pharmaceutical compositions into deliverable preparations, or aid in storing the pharmaceutical composition prior to administration. Pharmaceutically acceptable carriers can include agents that can stabilize, optimize or otherwise alter the form, consistency, viscosity, pH, pharmacokinetics, solubility of the formulation.

[1027] Some nonlimiting examples of materials which can serve as pharmaceutically-acceptable carriers include: (1) sugars, such as lactose, glucose and sucrose; (2) starches, such as corn starch and potato starch; (3) cellulose, and its derivatives, such as sodium carboxymethyl cellulose, methylcellulose, ethyl cellulose, microcrystalline cellulose and cellulose acetate; (4) powdered tragacanth; (5) malt; (6) gelatin; (7) lubricating agents, such as magnesium stearate, sodium lauryl sulfate and talc; (8) excipients, such as cocoa butter and suppository waxes; (9) oils, such as peanut oil, cottonseed oil, safflower oil, sesame oil, olive oil, corn oil and soybean oil; (10) glycols, such as propylene glycol; (11) polyols, such as glycerin, sorbitol, mannitol and polyethylene glycol (PEG); (12) esters, such as ethyl oleate and ethyl laurate; (13) agar; (14) buffering agents, such as magnesium hydroxide and aluminum hydroxide; (15) alginic acid; (16) pyrogen-free water; (17) isotonic saline; (18) Ringer's solution; (19) ethyl alcohol; (20) pH buffered solutions; (21) polyesters, polycarbonates and/or polyanhydrides; (22) bulking agents, such as polypeptides and amino acids (23) serum alcohols, such as ethanol; and (23) other non-toxic compatible substances employed in pharmaceutical formulations. Buffering agents, wetting agents, emulsifying agents, diluents, encapsulating agents, skin penetration enhancers, coloring agents, release agents, coating agents, sweetening agents, flavoring agents, perfuming agents, preservative and antioxidants can also be present in the formulation. For example, carriers can include, but are not limited to, saline, buffered saline, dextrose, arginine, sucrose, water, glycerol, ethanol, sorbitol, dextran, sodium carboxymethyl cellulose, and combinations thereof.

[1028] Pharmaceutical compositions can comprise one or more pH buffering compounds to maintain the pH of the formulation at a predetermined level that reflects physiological pH, such as in the range of about 5.0 to about 8.0. The pH buffering compound used in the aqueous liquid formulation can be an amino acid or mixture of amino acids, such as histidine or a mixture of amino acids such as histidine and glycine. Alternatively, the pH buffering compound is preferably an agent which maintains the pH of the formulation at a predetermined level, such as in the range of about 5.0 to about 8.0, and which does not chelate calcium ions. Illustrative examples of such pH buffering compounds include, but are not limited to, imidazole and acetate ions. The pH buffering compound may be present in any amount suitable to maintain the pH of the formulation at a predetermined level.

[1029] Pharmaceutical compositions can also contain one or more osmotic modulating agents, i.e., a compound that modulates the osmotic properties (e.g., tonicity, osmolality, and/or osmotic pressure) of the formulation to a level that is acceptable to the blood stream and blood cells of recipient individuals. The osmotic modulating agent can be an agent that does not chelate calcium ions. The osmotic modulating agent can be any compound known or available to those skilled in the art that modulates the osmotic properties of the formulation. One skilled in the art may empirically determine the suitability of a given osmotic modulating agent for use in the inventive formulation. Illustrative examples of suitable types of osmotic modulating agents include, but are not limited to: salts, such as sodium chloride and sodium acetate; sugars, such as sucrose, dextrose, and mannitol; amino acids, such as glycine; and mixtures of one or more of these agents and/or types of agents. The osmotic modulating agent(s) may be present in any concentration sufficient to modulate the osmotic properties of the formulation.

[1030] In some embodiments, the pharmaceutical composition is formulated for delivery to a subject, e.g., for gene editing. In some embodiments, administration of the pharmaceutical compositions contemplated herein may be carried out using conventional techniques including, but not limited to, infusion, transfusion, or parenterally. In some embodiments, parenteral administration includes infusing or injecting intravascularly, intravenously, intramuscularly, intraarterially, intrathecally, intratumorally, intradermally, intraperitoneally, transtracheally, subcutaneously, subcuticularly, intraarticularly, subcapsularly, subarachnoidly and intrasternally. In some embodiments, suitable routes of administrating the pharmaceutical composition described herein include, without limitation: topical, subcutaneous, transdermal, intradermal, intralesional, intraarticular, intraperitoneal, intravesical, transmucosal, gingival, intradental, intracochlear, transtympanic, intraorgan, epidural, intrathecal, intramuscular, intravenous, intravascular, intraosseus, periocular, intratumoral, intracerebral, and intracerebroventricular administration.

[1031] In some embodiments, the pharmaceutical composition described herein is administered locally to a diseased site (e.g., tumor site). In some embodiments, the pharmaceutical composition described herein is administered to a subject by injection, by means of a catheter, by means of a suppository, or by means of an implant, the implant being of a porous, non-porous, or gelatinous material, including a membrane, such as a sialastic membrane, or a fiber.

[1032] In other embodiments, the pharmaceutical composition described herein is delivered in a controlled release system. In one embodiment, a pump can be used (see, e.g., Langer, 1990, Science 249: 1527-1533; Sefton, 1989, CRC Crit. Ref. Biomed. Eng. 14:201; Buchwald et al., 1980, Surgery 88:507; Saudek et al, 1989, N. Engl. J. Med. 321:574). In another embodiment, polymeric materials can be used. (See, e.g., Medical Applications of Controlled Release (Langer and Wise eds., CRC Press, Boca Raton, Fla., 1974); Controlled Drug Bioavailability, Drug Product Design and Performance (Smolen and Ball eds., Wiley, New York, 1984); Ranger and Peppas, 1983, Macromol. Sci. Rev. Macromol. Chem. 23:61. See also Levy et al., 1985, Science 228: 190; During et al., 1989, Ann. Neurol. 25:351; Howard et ah, 1989, J. Neurosurg. 71: 105.) Other controlled release systems are discussed, for example, in Langer, supra.

[1033] In some embodiments, the pharmaceutical composition is formulated in accordance with routine procedures as a composition adapted for intravenous or subcutaneous administration to a subject, e.g., a human. In some embodiments, pharmaceutical composition for administration by injection are solutions in sterile isotonic use as solubilizing agent and a local anesthetic such as lignocaine to ease pain at the site of the injection. Generally, the ingredients are supplied either separately or mixed together in unit dosage form, for example, as a dry lyophilized powder or water free concentrate in a hermetically sealed container such as an ampoule or sachette indicating the quantity of active agent. Where the pharmaceutical is to be administered by infusion, it can be dispensed with an infusion bottle containing sterile pharmaceutical grade water or saline. Where the pharmaceutical composition is administered by injection, an ampoule of sterile water for injection or saline can be provided so that the ingredients can be mixed prior to administration.

[1034] A pharmaceutical composition for systemic administration can be a liquid, e.g., sterile saline, lactated Ringer's or Hank's solution. In addition, the pharmaceutical composition can be in solid forms and re-dissolved or suspended immediately prior to use. Lyophilized forms are also contemplated. The pharmaceutical composition can be contained within a lipid particle or vesicle, such as a liposome or microcrystal, which is also suitable for parenteral administration. The particles can be of any suitable structure, such as unilamellar or plurilamellar, so long as compositions are contained therein. Compounds can be entrapped in “stabilized plasmid-lipid particles” (SPLP) containing the fusogenic lipid dioleoylphosphatidylethanolamine (DOPE), low levels (5-10 mol %) of cationic lipid, and stabilized by a polyethyleneglycol (PEG) coating (Zhang Y. P. et ah, Gene Ther. 1999, 6: 1438-47). Positively charged lipids such as N-[1-(2,3-dioleoyloxi)propyl]-N,N,N-trimethyl-amoniummethylsulfate, or “DOTAP,” are particularly preferred for such particles and vesicles. The preparation of such lipid particles is well known. See, e.g., U.S. Pat. Nos. 4,880,635; 4,906,477; 4,911,928; 4,917,951; 4,920,016; and 4,921,757; each of which is incorporated herein by reference.

[1035] The pharmaceutical composition described herein can be administered or packaged as a unit dose, for example. The term “unit dose” when used in reference to a pharmaceutical composition of the present disclosure refers to physically discrete units suitable as unitary dosage for the subject, each unit containing a predetermined quantity of active material calculated to produce the desired therapeutic effect in association with the required diluent; i.e., carrier, or vehicle.

[1036] Further, the pharmaceutical composition can be provided as a pharmaceutical kit comprising (a) a container containing a compound of the invention in lyophilized form and (b) a second container containing a pharmaceutically acceptable diluent (e.g., sterile used for reconstitution or dilution of the lyophilized compound of the invention. Optionally associated with such container(s) can be a notice in the form prescribed by a governmental agency regulating the manufacture, use or sale of pharmaceuticals or biological products, which notice reflects approval by the agency of manufacture, use or sale for human administration.

[1037] In another aspect, an article of manufacture containing materials useful for the treatment of the diseases described above is included. In some embodiments, the article of manufacture comprises a container and a label. Suitable containers include, for example, bottles, vials, syringes, and test tubes. The containers can be formed from a variety of materials such as glass or plastic. In some embodiments, the container holds a composition that is effective for treating a disease described herein and can have a sterile access port. For example, the container can be an intravenous solution bag or a vial having a stopper pierceable by a hypodermic injection needle. The active agent in the composition is a compound of the invention. In some embodiments, the label on or associated with the container indicates that the composition is used for treating the disease of choice. The article of manufacture can further comprise a second container comprising a pharmaceutically-acceptable buffer, such as phosphate-buffered saline, Ringer's solution, or dextrose solution. It can further include other materials desirable from a commercial and user standpoint, including other buffers, diluents, filters, needles, syringes, and package inserts with instructions for use.

[1038] In some embodiments, any of the fusion proteins, gRNAs, and/or complexes described herein are provided as part of a pharmaceutical composition. In some embodiments, the pharmaceutical composition comprises any of the fusion proteins provided herein. In some embodiments, the pharmaceutical composition comprises any of the complexes provided herein. In some embodiments, the pharmaceutical composition comprises a ribonucleoprotein complex comprising an RNA-guided nuclease (e.g., Cas9) that forms a complex with a gRNA and a cationic lipid. In some embodiments pharmaceutical composition comprises a gRNA, a nucleic acid programmable DNA binding protein, a cationic lipid, and a pharmaceutically acceptable excipient. Pharmaceutical compositions can optionally comprise one or more additional therapeutically active substances.

[1039] In some embodiments, compositions provided herein are administered to a subject, for example, to a human subject, in order to effect a targeted genomic modification within the subject. In some embodiments, cells are obtained from the subject and contacted with any of the pharmaceutical compositions provided herein. In some embodiments, cells removed from a subject and contacted ex vivo with a pharmaceutical composition are re-introduced into the subject, optionally after the desired genomic modification has been effected or detected in the cells. Methods of delivering pharmaceutical compositions comprising nucleases are known, and are described, for example, in U.S. Pat. Nos. 6,453,242; 6,503,717; 6,534,261; 6,599,692; 6,607,882; 6,689,558; 6,824,978; 6,933,113; 6,979,539; 7,013,219; and 7,163,824, the disclosures of which are incorporated by reference herein in their entireties. Although the descriptions of pharmaceutical compositions provided herein are principally directed to pharmaceutical compositions which are suitable for administration to humans, it will be understood by the skilled artisan that such compositions are generally suitable for administration to animals or organisms of all sorts, for example, for veterinary use.

[1040] Modification of pharmaceutical compositions suitable for administration to humans in order to render the compositions suitable for administration to various animals is well understood, and the ordinarily skilled veterinary pharmacologist can design and/or perform such modification with merely ordinary, if any, experimentation. Subjects to which administration of the pharmaceutical compositions is contemplated include, but are not limited to, humans and/or other primates; mammals, domesticated animals, pets, and commercially relevant mammals such as cattle, pigs, horses, sheep, cats, dogs, mice, and/or rats; and/or birds, including commercially relevant birds such as chickens, ducks, geese, and/or turkeys.

[1041] Formulations of the pharmaceutical compositions described herein can be prepared by any method known or hereafter developed in the art of pharmacology. In general, such preparatory methods include the step of bringing the active ingredient(s) into association with an excipient and/or one or more other accessory ingredients, and then, if necessary and/or desirable, shaping and/or packaging the product into a desired single- or multi-dose unit. Pharmaceutical formulations can additionally comprise a pharmaceutically acceptable excipient, which, as used herein, includes any and all solvents, dispersion media, diluents, or other liquid vehicles, dispersion or suspension aids, surface active agents, isotonic agents, thickening or emulsifying agents, preservatives, solid binders, lubricants and the like, as suited to the particular dosage form desired. Remington's The Science and Practice of Pharmacy, 21st Edition, A. R. Gennaro (Lippincott, Williams & Wilkins, Baltimore, Md., 2006; incorporated in its entirety herein by reference) discloses various excipients used in formulating pharmaceutical compositions and known techniques for the preparation thereof. See also PCT application PCT/US2010/055131 (Publication number WO2011/053982 A8, filed Nov. 2, 2010), incorporated in its entirety herein by reference, for additional suitable methods, reagents, excipients and solvents for producing pharmaceutical compositions comprising a nuclease.

[1042] Except insofar as any conventional excipient medium is incompatible with a substance or its derivatives, such as by producing any undesirable biological effect or otherwise interacting in a deleterious manner with any other component(s) of the pharmaceutical composition, its use is contemplated to be within the scope of this disclosure.

[1043] The compositions, as described above, can be administered in effective amounts. The effective amount will depend upon the mode of administration, the particular condition being treated, and the desired outcome. It may also depend upon the stage of the condition, the age and physical condition of the subject, the nature of concurrent therapy, if any, and like factors well-known to the medical practitioner. For therapeutic applications, it is that amount sufficient to achieve a medically desirable result.

[1044] In some embodiments, compositions in accordance with the present disclosure can be used for treatment of any of a variety of diseases, disorders, and/or conditions. In some embodiments, compositions in accordance with the present disclosure can be used for treatment of ALS. In some embodiments, compositions in accordance with the present disclosure can be used for treatment of SBMA.

### Kit

[1045] Various aspects of this disclosure provide kits comprising a base editor system. In one embodiment, the kit comprises a nucleic acid construct comprising a nucleotide sequence encoding a nucleobase editor fusion protein. The fusion protein comprises a deaminase (e.g., cytidine deaminase or adenine deaminase) and a nucleic acid programmable DNA binding protein (napDNAbp). In some embodiments, the kit comprises at least one guide RNA capable of targeting a nucleic acid molecule of interest. In some embodiments, the nucleic acid molecule of interest is a splice acceptor site (e.g., an AG site) in an intron nucleic acid sequence preceding an exon nucleic acid sequence, e.g., exon 3, of the SOD1 gene. In some embodiments, the kit comprises at least one guide RNA capable of targeting an AR polynucleotide comprising a trinucleotide repeat expansion. In some embodiments, the kit comprises a nucleic acid construct comprising a nucleotide sequence encoding at least one guide RNA.

[1046] The kit provides, in some embodiments, instructions for using the kit to edit one or more mutations. In some embodiments, the kit provides instructions for using the kit to edit a splice acceptor situated 5′ of an exon, e.g., exon 3, of the SOD1 gene. In some embodiments, the kit provides instructions for using the kit to introduce a premature stop codon into an AR polynucleotide. In other embodiments, the kit provides instructions for using the kit to disrupt a splice site in an AR polynucleotide. The instructions will generally include information about the use of the kit for editing nucleic acid molecules. In other embodiments, the instructions include at least one of the following: precautions; warnings; clinical studies; and/or references. The instructions may be printed directly on the container (when present), or as a label applied to the container, or as a separate sheet, pamphlet, card, or folder supplied in or with the container. In a further embodiment, a kit can comprise instructions in the form of a label or separate insert (package insert) for suitable operational parameters. In yet another embodiment, the kit can comprise one or more containers with appropriate positive and negative controls or control samples, to be used as standard(s) for detection, calibration, or normalization. The kit can further comprise a second container comprising a pharmaceutically-acceptable buffer, such as (sterile) phosphate-buffered saline, Ringer's solution, or dextrose solution. It can further include other materials desirable from a commercial and user standpoint, including other buffers, diluents, filters, needles, syringes, and package inserts with instructions for use.

[1047] In certain embodiments, the kit is useful for the treatment of a subject having ALS. In certain embodiments, the kit is useful for the treatment of a subject having SBMA.

[1048] The practice of the present invention employs, unless otherwise indicated, conventional techniques of molecular biology (including recombinant techniques), microbiology, cell biology, biochemistry and immunology, which are well within the purview of the skilled artisan. Such techniques are explained fully in the literature, such as, “Molecular Cloning: A Laboratory Manual”, second edition (Sambrook, 1989); “Oligonucleotide Synthesis” (Gait, 1984); “Animal Cell Culture” (Freshney, 1987); “Methods in Enzymology” “Handbook of Experimental Immunology” (Weir, 1996); “Gene Transfer Vectors for Mammalian Cells” (Miller and Calos, 1987); “Current Protocols in Molecular Biology” (Ausubel, 1987); “PCR: The Polymerase Chain Reaction”, (Mullis, 1994); “Current Protocols in Immunology” (Coligan, 1991). These techniques are applicable to the production of the polynucleotides and polypeptides of the invention, and, as such, may be considered in making and practicing the invention. Particularly useful techniques for particular embodiments will be discussed in the sections that follow.

[1049] The following examples are put forth so as to provide those of ordinary skill in the art with a complete disclosure and description of how to make and use the assay, screening, and therapeutic methods of the invention, and are not intended to limit the scope of what the inventors regard as their invention.

### EXAMPLES

### Example 1: Adenosine Base Editors with Increased Editing Efficiency

[1050] Base editing systems that include a Tad7.10-dCas9 fusion proteins are capable of editing a target polynucleotide with approximately 10-20% efficiency, but for uses requiring higher efficiency their use may be limited. In an effort to identify adenine base editors having increased efficiency and specificity, constructs comprising the adenosine deaminase TadA 7.10 were mutagenized by error prone PCR and subsequently cloned into an expression vector adjacent to a nucleic acid sequence encoding dCas9, a nucleic acid programmable DNA binding protein (FIG. 1A). The expression vectors comprising the adenosine deaminase variants were co-transformed into competent bacterial cells with a selection plasmid encoding chloramphenicol resistance (CamR) and spectinomycin resistance (SpectR) and having a kanamycin resistance gene that was rendered nonfunctional by two point mutations (evolution round 7 strategy) (FIG. 1B). The cells were selected for restoration of kanamycin resistance, which was a read out for adenosine deaminase activity. In subsequent rounds of selection, the expression vectors were co-transformed into competent cells with a plasmid encoding chloramphenicol resistance (CamR) and spectinomycin resistance (SpectR) and having a kanamycin resistance gene that was rendered nonfunctional by three point mutations (evolution round 8 strategy) (FIG. 1C). An inactivated kanamycin resistance gene nucleic acid sequence is provided below:

ccggaattgccagctggggcgccctctggtaaggttgggaagccctgcaa
agtaaactggatggctttcttgccgccaaggatctgatggcgcaggggat
caagatctgatcaagagacaggatgaggatcctttcgcATGATCGAATAA
GATGGATTGCACGCAGGTTCTCCGGCCGCTTAGGTGGAGCGCCTATTCGG
CTATGACTGGGCACAACAGACAATCGGCTGCTCTGATGCCGCCGTGTTCC
GGCTGTCAGCGCAGGGGCGCCCGGTTCTTTTTGTCAAGACCGACCTGTCC
GGTGCCCTGAATGAACTGCAGGACGAGGCAGCGCGGCTATCGTGGCTGGC
CACGACGGGCGTTCCTTGCGCAGCTGTGCTCGACGTTGTCACTGAAGCGG
GAAGGGACTGGCTGCTATTGGGCGAAGTGCCGGGGCAGGATCTCCTGTCA
TCTCACCTTGCTCCTGCCGAGAAAGTATCCATCATGGCTGATGCAATGCG
GCGGCTGCATACGCTTGATCCGGCTACCTGCCCATTCGACCACCAAGCGA
AACATCGCATCGAGCGAGCACGTACTCGGATGGAAGCCGGTCTTGTCGAT
CAGGATGATCTGGACGAAGAGCATCAGGGGCTCGCGCCAGCCGAACTGTT
CGCCAGGCTCAAGGCGCGCATGCCCGACGGCGAGGATCTCGTCGTGACCC
ATGGCGATGCCTGCTTGCCGAATATCATGGTGGAAAATGGCCGCTTTTCT
GGATTCATTAACTGTGGCCGGCTGGGTGTGGCGGACCGCTATCAGGACAT
AGCGTTGGCTACCCGTGATATTGCTGAAGAGCTTGGCGGCGAATGGGCTG
ACCGCTTCCTCGTGCTTTACGGTATCGCCGCTCCCGATTCGCAGCGCATC
GCCTTCTATCGCCTTCTTGACGAGTTCTTCTAA

[1051] In the above sequence, lower case denotes the kanamycin resistance promoter region, bold sequence indicates targeted inactivation portion (Q4* and W15*), the italicized sequence denotes the targeted inactive site of kanamycin resistance gene (D208N), and the underlined sequences denote the PAM sequences.

[1052] Again, the cells were plated onto a series of agarose plates with increasing kanamycin concentration. As shown in FIG. 2, adenosine deaminase variants having efficient base editing activity were able to correct the mutations present in the kanamycin resistance gene and were selected for further analysis. Adenosine deaminase variant base editors showing efficient base editing in bacterial cells are described in Table 13. Mammalian expression vectors encoding base editors comprising the selected adenosine deaminase variants were generated.

[1053] Hek293T cells expressing a 0-globin protein associated with sickle cell disease that contains an E6V (also termed E7V) mutation were used to test the editing efficiency of the adenosine deaminase variants (FIGS. 3A and 3B). These cells termed “Hek293T/HBBE6V” cells were transduced using lentiviral vectors expressing a base editing system that includes a fusion protein comprising the ABE8 base editors listed in Table 13. The ABE8 base editors were generated by cloning an adenosine deaminase variant into a scaffold that included a circular permutant Cas9 and a bipartite nuclear localization sequence. Circular permutant Cas9s are known in the art and described, for example, in Oakes et al., Cell 176, 254-267, 2019. These sequences are provided herein below.

[1054] Upregulation of fetal hemoglobin is a therapeutic approach to overcoming sickle cell disease. FIG. 3A shows a therapeutically relevant site for upregulation of fetal hemoglobin. Editing adenosines at residues 5 and 8 can significantly reduce BCL11A binding, thereby increasing expression of fetal hemoglobin. Referring to FIG. 3A, the ARE8 base editors exhibited approximately 2-3 fold more base editing activity than the ABE7.10 base editor.

TABLE 13
Novel Adenine Base Editors ABE8

| plasmid ID | description | function |
|---|---|---|
| 280 | ABE8.1 | monomer_TadA*7.10 + Y147T |
| 281 | ABE8.2 | monomer_TadA*7.10 + Y147R |
| 282 | ABE8.3 | monomer_TadA*7.10 + Q1545 |
| 283 | ABE8.4 | monomer_TadA*7.10 + Y123H |
| 284 | ABE8.5 | monomer_TadA*7.10 + V82S |
| 285 | ABE8.6 | monomer_TadA*7.10 + T166R |
| 286 | ABE8.7 | monomer_TadA*7.10 + Q154R |
| 287 | ABE8.8 | monomer_Y147R_Q154R_Y123H |
| 288 | ABE8.9 | monomer_Y147R_Q154R_I76Y |
| 289 | ABE8.10 | monomer_Y147R_Q154R_T166R |
| 290 | ABE8.11 | monomer_Y147T_Q154R |
| 291 | ABE8.12 | monomer_Y147T_Q1545 |
| 292 | ABE8.13 | monomer_H123Y123H_Y147R_Q154R_I76Y |
| 293 | ABE8.14 | heterodimer_TadA*7.10 + Y147T |
| 294 | ABE8.15 | heterodimer_TadA*7.10 + Y147R |
| 295 | ABE8.16 | heterodimer_TadA*7.10 + Q1545 |
| 296 | ABE8.17 | heterodimer_TadA*7.10 + Y123H |
| 297 | ABE8.18 | heterodimer_TadA*7.10 + V82S |
| 298 | ABE8.19 | heterodimer_TadA*7.10 + T166R |
| 299 | ABE8.20 | heterodimer_TadA*7.10 + Q154R |
| 300 | ABE8.21 | heterodimer_Y147R_Q154R_Y123H |
| 301 | ABE8.22 | heterodimer_Y147R_Q154R_I76Y |
| 302 | ABE8.23 | heterodimer_Y147R_Q154R_T166R |
| 303 | ABE8.24 | heterodimer_Y147T_ Q154R |
| 304 | ABE8.25 | heterodimer_Y147T_Q1545 |

[1055] Referring to FIG. 4, the ABE8 base editors were introduced into Hek293T/HBBE6V cells along with 18, 19, 20, 21, or 22 nucleotide guide RNAs targeting the polynucleotide encoding HBB E6V. The ABE8 editors showed increased editing efficiency when fused to circular permutant (Cp)-Cas9. In total, 40 different ABE8 constructs (Table 14) and three ABE7.10 constructs were tested for editing activity in Hek293T/HBBE6V cells. The sequence of exemplary constructs follows. To evaluate the specificity of editing, target and unintended or bystander mutations were monitored (FIG. 5). Unintended editing of an adenosine in codon was silent. However, unintended editing of codon 9 resulted in a serine to proline mutation. Referring again to FIG. 5, multiple ABE base editors showed increased editing efficiency and specificity compared to the ABE10 editors, and none of the editors had significant bystander editing that led to the serine to proline missense mutation.

[1056] Further analysis of selected ABE8 base editors and an ABE7.10 base editor control was carried out in fibroblast cells containing the sickle cell mutation. As shown in FIG. 6, the ABE8 editors had increased base editing activity compared to the ABE7.10. ABE8.18 showed approximately 70% efficiency. The selected ABE8 editors also displayed unprecedented specificity. Importantly, the average INDEL formation for all AES editors was less than 0.1%.

TABLE 14

| plasmid ID | description | function |
|---|---|---|
| 335 | NGC PAM CP5 variant (S. pyogenes | monomer_TadA*7.10 + Y147T |
| | Cas9)_ABE8.1 | |
| 336 | NGC PAM CP5 variant (S. pyogrouns | monomer_TadA*7.10 + Y147R |
| | Cas9)_ABE8.2 | |
| 337 | NGC PAM CP5 variant (S. pyogenes | monomer_TadA*7.10 + Q1545 |
| | Cas9)_ABE8.3 | |
| 338 | NGC PAM CP5 variant (S. pyogenes | monomer_TadA*7.10 + Y123H |
| | Cas9)_ABE8.4 | |
| 339 | NGC PAM CP5 variant (S. pyogenes | monomer_TadA*7.10 + V82S |
| | Cas9)_ABE8.5 | |
| 340 | NGC PAM CP5 variant (S. pyogenes | monomer_TadA*7.10 + T166R |
| | Cas9)_ABE8.6 | |
| 341 | NGC PAM CP5 variant (S. pyogenes | monomer_TadA*7.10 + Q154R |
| | Cas9)_ABE8.7 | |
| 342 | NGC PAM CP5 variant (S. pyogenes | monomer_Y147R_Q154R_Y123H |
| | Cas9)_ABE8.8 | |
| 343 | NGC PAM CP5 variant (S. pyogenes | monomer_Y147R_Q154R_I76Y |
| | Cas9)_ABE8.9 | |
| 344 | NGC PAM CP5 variant (S. pyogenes | monomer_Y147R_Q154R_T166R |
| | Cas9)_ABE8.10 | |
| 345 | NGC PAM CP5 variant (S. pyogenes | monomer_Y147T_Q154R |
| | Cas9)_ABE8.11 | |
| 346 | NGC PAM CP5 variant (S. pyogenes | monomer_Y147T_Q1545 |
| | Cas9)_ABE8.12 | |
| 347 | NGC PAM CP5 variant (S. pyogenes | monomer_H123Y123H_Y147R_Q154R_I76Y |
| | Cas9)_ABE8.13 | |
| 348 | NGC PAM CP5 variant (S. pyogenes | monomer_deletion at TadA7.10* residue 149 |
| | Cas9)_ABE7.10 | |
| 349 | NGC PAM CP5 variant (S. pyogenes | monomer_deletion at TadA7.10* residue 150 |
| | Cas9)_ABE7.10 | |
| 350 | NGC PAM CP5 variant (S. pyogenes | monomer_deletion at TadA7.10* residue 151 |
| | Cas9)_ABE7.10 | |
| 351 | NGC PAM CP5 variant (S. pyogenes | monomer_deletion at TadA7.10* residue 152 |
| | Cas9)_ABE7.10 | |
| 352 | NGC PAM CP5 variant (S. pyogenes | monomer_deletion at TadA7.10* residue 153 |
| | Cas9)_ABE7.10 | |
| 353 | NGC PAM CP5 variant (S. pyogenes | monomer_deletion at TadA7.10* residue 154 |
| | Cas9)_ABE7.10 | |
| 354 | NGC PAM CP5 variant (S. pyogenes | monomer_deletion at TadA7.10* residue 155 |
| | Cas9)_ABE7.10 | |
| 355 | NGC PAM CP5 variant (S. pyogenes | monomer_deletion at TadA7.10* residue 156 |
| | Cas9)_ABE7.10 | |
| 356 | NGC PAM CP5 variant (S. pyogenes | monomer_deletion at TadA7.10* residue 157 |
| | Cas9)_ABE7.10 | |
| 357 | NGC PAM CP5 variant (S. pyogenes | heterodimer_TadA*7.10 + Y147T |
| | Cas9)_ABE8.14 | |
| 358 | NGC PAM CP5 variant (S. pyogenes | heterodimer_TadA*7.10 + Y147R |
| | Cas9)_ABE8.15 | |
| 359 | NGC PAM CP5 variant (S. pyogenes | heterodimer_TadA*7.10 + Q1545 |
| | Cas9)_ABE8.16 | |
| 360 | NGC PAM CP5 variant (S. pyogenes | heterodimer_TadA*7.10 + Y123H |
| | Cas9)_ABE8.17 | |
| 361 | NGC PAM C | heterodimer_TadA*7.10 + V82S |
| | P5 variant (S. pyogenes Cas9)_ABE8.18 | |
| 362 | NGC PAM CP5 variant (S. pyogenes | heterodimer_TadA*7.10 + T166R |
| | Cas9)_ABE8.19 | |
| 363 | NGC PAM CP5 variant (S. pyogenes | heterodimer_TadA*7.10 + Q154R |
| | Cas9)_ABE8.20 | |
| 364 | NGC PAM CP5 variant (S. pyogenes | heterodimer_Y147R_Q154R_Y123H |
| | Cas9)_ABE8.21 | |
| 365 | NGC PAM CP5 variant (S. pyogenes | heterodimer_Y147R_Q154R_I76Y |
| | Cas9)_ABE8.22 | |
| 366 | NGC PAM CP5 variant (S. pyogenes | heterodimer_Y147R_Q154R_T166R |
| | Cas9)_ABE8.23 | |
| 367 | NGC PAM CP5 variant (S. pyogenes | heterodimer_Y147T_Q154R |
| | Cas9)_ABE8.24 | |
| 368 | NGC PAM CP5 variant (S. pyogenes | heterodimer_Y147T_Q154S |
| | Cas9)_ABE8.25 | |
| 369 | NGC PAM CP5 variant (S. pyogenes | heterodimer_H123Y123H_Y147R_Q154R_I76Y |
| | Cas9)_ABE8.26 | |
| 370 | NGC PAM CP5 variant (S. pyogenes | heterodimer_deletion at TadA7.10* residue 149 |
| | Cas9)_ABE7.10 | |
| 371 | NGC PAM CP5 variant (S. pyogenes | heterodimer_deletion at TadA7.10* residue 150 |
| | Cas9)_ABE7.10 | |
| 372 | NGC PAM CP5 variant (S. pyogenes | heterodimer_deletion at TadA7.10* residue 151 |
| | Cas9)_ABE7.10 | |
| 373 | NGC PAM CP5 variant (S. pyogenes | heterodimer_deletion at TadA7.10* residue 152 |
| | Cas9)_ABE7.10 | |
| 374 | NGC PAM CP5 variant (S. pyogenes | heterodimer_deletion at TadA7.10* residue 153 |
| | Cas9)_ABE7.10 | |
| 375 | NGC PAM CP5 variant (S. pyogenes | heterodimer_deletion at TadA7.10* residue 154 |
| | Cas9)_ABE7.10 | |
| 376 | NGC PAM CP5 variant (S. pyogenes | heterodimer_deletion at TadA7.10* residue 155 |
| | Cas9)_ABE7.10 | |
| 377 | NGC PAM CP5 variant (S. pyogenes | heterodimer_deletion at TadA7.10* residue 156 |
| | Cas9)_ABE7.10 | |
| 378 | NGC PAM CP5 variant (S. pyogenes | heterodimer_deletion at TadA7.10* residue 157 |
| | Cas9)_ABE7.10 | |

### Example 2: Codon Optimization and NLS Choice for ABE8 Design

[1057] It has been established that Cas9 codon usage and nuclear localization sequence can dramatically alter genome editing efficiencies in eukaryotes (see e.g., Kim, S. et al., Rescue of high-specificity Cas9 variants using sgRNAs with matched 5′ nucleotides. Genome Biol 18, 218, doi:10.1186/s13059-017-1355-3 (2017); Mikami, M. et al., Comparison of CRISPR/Cas9 expression constructs for efficient targeted mutagenesis in rice. Plant Mol Biol 88, 561-572, doi:10.1007/s11103-015-0342-x (2015); Jinek, M. et al., RNA-programmed genome editing in human cells. Elife 2, e00471, doi:10.7554/eLife.00471 (2013)). The original Cas9n component of base editors contains six potential polyadenylation sites, leading to poor expression in eukaryotes (see e.g., Kim, S. et al., Rescue of high-specificity Cas9 variants using sgRNAs with matched 5′ nucleotides. Genome Biol 18, 218, doi:10.1186/s13059-017-1355-3 (2017); Komor, A. C. et al., Programmable editing of a target base in genomic DNA without double-stranded DNA cleavage. Nature 533, 420-424, doi:10.1038/nature17946 (2016); Gaudelli, N. M. et al. Programmable base editing of A*T to G*C in genomic DNA without DNA cleavage. Nature 551, 464-471, doi:10.1038/nature24644 (2017)). Replacing this with an extensively optimized codon sequence improves base editing efficiencies (see e.g., Cong, L. et al. Multiplex genome engineering using CRISPR/Cas systems. Science 339, 819-823, doi:10.1126/science.1231143 (2013); Koblan, L. W. et al. Improving cytidine and adenine base editors by expression optimization and ancestral reconstruction. Nat Biotechnol, doi:10.1038/nbt.4172 (2018); Zafra, M. P. et al. Optimized base editors enable efficient editing in cells, organoids and mice. Nat Biotechnol, doi:10.1038/nbt.4194 (2018)).

[1058] DNA on-target (FIG. 9A, 9B), DNA off-target (FIG. 9C, 9D) and RNA off-target (FIG. 9E) base editing frequencies associated with four ABE constructs were assessed, all of which contain a codon-optimized Cas9(D10A): i) ABE7.10, which has a single C-terminal BP-SV40 NLS; ii) monoABE7.10 which lacks the 5′ TadA wild-type portion of ABE7.10; iii) ABEmax, which contains codon-optimized TadA regions and two BPNLS sequences; and iv) ABEmax(-BPNLS), which has the TadA codon optimization as ABEmax but contains a single C-terminal BP-SV40 NLS.

[1059] All four constructs displayed remarkably similar on-target editing efficiencies, indicating that the NLS architecture and TadA codon optimization are not determining for on-target editing efficiency (FIG. 9A, 9B). The off-target profiles were also highly similar, but ABEmax displayed significantly greater DNA off-target editing (p=0.00027, Students' two-tailed T test) at one site when compared to ABE7.10 (FIG. 9C, 9D). ABEmax(-NBPNLS) displayed a 1.6-fold greater mean frequency of RNA off-target editing than ABE7.10 (FIG. 9E).

### Example 3: Superior Adenine Base Editors with Expanded Targeting Range

[1060] ABE is a molecular machine comprising an evolved E. coli tRNAARG modifying enzyme, TadA, covalently fused to a catalytically-impaired Cas9 protein (D10A nickase Cas9, nCas9) (FIGS. 7A and 7B). To overcome limitation of prior adenine base editors, the stringency of the bacterial selection system was increased by designing ABEs that must make three concurrent A⋅T to G⋅C reversion edits to survive antibiotic selection. In the prior ABE evolutions, TadA libraries were created via error-prone PCR. Contrastingly, a synthetic library of TadA alleles was utilized containing all 20 canonical amino acid substitutions at each position of TadA, with an average frequency of 1-2 nucleotide substitution mutations per library member. This chemical library enabled access to a greater sequence space than is achievable with error-prone PCR techniques.

[1061] About 300 clones were isolated and subsequently sequenced. From the resultant sequencing data, eight mutations were identified within TadA* that were enriched with high frequency (Tables 7 and 9). Six of the eight identified amino acid mutations required at least two nucleobase changes per codon, which were unobserved with the previous TadA error-prone libraries. Two of the enriched mutations alter residues proximal to the active site of adenine deamination (I76 and V82) (FIG. 7C). In addition to the four previously reported mutations in the C-terminal alpha helix of TadA*7.10, two new mutations were observed within the same alpha-helix (Y147R and Q154R) (FIG. 7C). This highly mutated alpha-helix is necessary for robust product formation because upon truncation, base editing efficiency was substantially reduced (FIGS. 10A and 10B).

[1062] To test the activity of TadA* variants in mammalian cells, BE codon optimization and NLS orientation was utilized with the most favorable on- and off-target profile (see Example 2; FIGS. 9A-9E). The eight enriched TadA* mutations were incorporated into ABE7.10 in various combinations, yielding forty new ABE8 variants (Tables 7 and 9). ABE8 constructs were made where the TadA region of ABE is either heterodimeric fusion of an inactive (wild-type) and active (evolved) TadA* protomer or a single protomer of an engineered TadA*, resulting in about a 500 base-pair smaller editor. These architectural variants are referred to as ABE8.x-d and ABE8.x-m respectively (Tables 7 and 9).

[1063] First, these forty constructs were evaluated for their on-target DNA editing efficiencies relative to ABE7.10 across eight genomic sites containing target A bases in positions which range from 2 to 20 (where NGG PAM=positions 21, 22, 23) within the canonical 20-nt S. pyogenes protospacer (FIG. 11). The N-terminal wild-type TadA construct was not necessary for robust DNA editing using ABE8. Indeed, constructs containing the N-terminal, wild-type TadA (ABE8.x-d) perform similarly in terms of both editing window preference, total DNA editing outcome, and INDEL frequency relative to its economized architecture (ABE8.x-m) (FIG. 7D, FIG. 11, FIG. 12). Although intra-construct, TadA(wt):TadA*8 dimerization may not be necessary for ABE8 activity, it does not preclude the possibility of in trans TadA*8:TadA*8 dimerization occurring between ABE8 expressed base editors.

[1064] Across all sites tested, ABE8s result in about 1.5x higher editing at canonical positions (A5-A7) in the protospacer and about 3.2x higher editing at non-canonical positions (A3-A4, A8-A10) compared with ABE7.10 (FIG. 13). Fold differences vary between sequence of the target, position of the “A” within the target window and ABE8 construct identity (FIG. 7D, FIG. 11, FIG. 13). Overall, the median change in editing across all positions, in all sites tested is 1.94-fold relative to ABE7.10 (range 1.34-4.49).

[1065] Next, from the large ABE8 pool of forty constructs, a sub-set of ABE8 constructs (ABE8.8-m, ABE8.13-m, ABE8.17-m, ABE8.20-m, ABE8.8-d, ABE8.13-m, ABE8.17-d and ABE8.20-d) were selected to evaluate in greater detail. These constructs represent ABE8s with distinct differences in editing performance amongst the 8 genomic sites as determined through a hierarchical clustering analysis (FIG. 14). These ABE8s all significantly outperform ABE7.10 at all genomic sites tested (P-value=0.0006871, two-tailed Wilcoxon rank sum test) and encompass a variety of combinations of mutations identified from the ABE8 directed evolution campaign (FIG. 15 and FIG. 16).

[1066] Although ABE variants recognizing non-NGG PAMs have been described, editing efficiencies of these constructs are decreased in many instances when compared to outcomes observed with S. pyogenes Cas9 targeting NGG PAM sequences (see e.g., Huang, T. P. et al. Circularly permuted and PAM-modified Cas9 variants broaden the targeting scope of base editors. Nat Biotechnol 37, 626-631, doi:10.1038/s41587-019-0134-y (2019); Hua, K. et al., Expanding the base editing scope in rice by using Cas9 variants. Plant Biotechnol J, doi:10.1111/pbi.12993 (2018); Yang, L. et al., Increasing targeting scope of adenosine base editors in mouse and rat embryos through fusion of TadA deaminase with Cas9 variants. Protein Cell 9, 814-819, doi:10.1007/s13238-018-0568-x (2018)). To determine whether evolved deaminase also increases the editing efficiencies at target sites bearing non-NGG PAMs, ABE8 editors were created that replace S. pyogenes Cas9 with an engineered S. py. variant, NG-Cas9 (PAM: NG) (Nishimasu, H. et al. Engineered CRISPR-Cas9 nuclease with expanded targeting space. Science (2018)) or Staphylococcus aureus Cas9 (SaCas9, PAM: NNGRRT) (Ran, F. A. et al. In vivo genome editing using Staphylococcus aureus Cas9. Nature 520, 186-191, doi:10.1038/nature14299 (2015)). Median increases were observed in A⋅T to G⋅C editing frequencies of 1.6- and 2.0-fold, respectively, when comparing ABE8 variants to ABE7.10 for both SpCas9-NG (NG-ABE8.x-m/d) and SaCas9 (Sa-ABE8.x-m/d) (FIGS. 8A, 8B, and 17-20). Similar to SpCas9-ABE8, the greatest differences in editing efficiencies between ABE7.10 and ABE8 constructs for the non-NGG PAM variants are observed at target A positions located at the periphery of the preferred position in the editing window (S. pyogenes: positions 4-8; S. aureus: positions 6-13; see also Rees, H. A. & Liu, D. R., Base editing: precision chemistry on the genome and transcriptome of living cells. Nat Rev Genet 19, 770-788, doi:10.1038/s41576-018-0059-1 (2018)). ABE8 orthologs utilizing non-NGG PAMs broaden the targeting scope for efficient A base editing.

[1067] For applications where minimizing indel formation is necessary, the effect of replacing the catalytically impaired D10A nickase mutant of Cas9 with a catalytically “dead” version of Cas9 (D10A+H840A) (see Jinek, M. et al. A programmable dual-RNA-guided DNA endonuclease in adaptive bacterial immunity. Science 337, 816-821, doi:10.1126/science.1225829 (2012)) was explored in the core eight ABE8 constructs (“dC9-ABE8.x-m/d”). By replacing the nickase with dead Cas9 in ABEs, a >90% reduction in indel frequency was observed for dC9-ABE8 variants relative to ABE7.10 while maintaining a significantly higher (2.1-fold), on-target DNA editing efficiency (FIGS. 8C, 21, 22, 23A, and 23B). Although indels above background are observed, frequencies ranged only from 0.3-0.8% at sites tested. Encouragingly, dC9-ABE8 variants only have a median 14% reduction in on-target DNA editing efficiencies relative to canonical ABE8s.

[1068] Another class of undesired ABE-mediated genome edit at an on-target locus is an ABE-dependent cytosine to uracil (C⋅G to T⋅A) conversion (see Grunewald, J. et al., CRISPR DNA base editors with reduced RNA off-target and self-editing activities. Nat Biotechnol 37, 1041-1048, doi:10.1038/s41587-019-0236-6 (2019); Lee, C. et al. CRISPR-Pass: Gene Rescue of Nonsense Mutations Using Adenine Base Editors. Mol Ther 27, 1364-1371, doi:10.1016/j.ymthe.2019.05.013 (2019)). At the eight target sites tested, the 95* percentile of C-to-T editing was measured to be 0.45% with ABE8 variants and 0.15% with ABE7.10-d or -m, indicating that on-target cytosine deamination with ABEs can occur but the frequencies are generally very low (FIG. 24). Together, these data indicate that ABE8s retain high specificity for A-to-G conversion compared to other, often undesirable byproducts.

### Example 4: DNA On-Target and sgRNA-Dependent DNA Off-Target Editing by ABE8 Constructs Improve Specificity for DNA

[1069] As with all base editors, ABE8s have the potential to act at off-target loci in the genome and transcriptome (see e.g., Gaudelli, N. M. et al. Programmable base editing of A*T to G*C in genomic DNA without DNA cleavage. Nature 551, 464-471, doi:10.1038/nature24644 (2017); Komor, A. C., et al., Programmable editing of a target base in genomic DNA without double-stranded DNA cleavage. Nature 533, 420-424, doi:10.1038/nature17946 (2016); Grunewald, J. et al. CRISPR DNA base editors with reduced RNA off-target and self-editing activities. Nat Biotechnol 37, 1041-1048, doi:10.1038/s41587-019-0236-6 (2019); Rees, H. A., et al., Analysis and minimization of cellular RNA editing by DNA adenine base editors. Sci Adv 5, eaax5717, doi:10.1126/sciadv.aax5717 (2019); Rees, H. A. et al. Improving the DNA specificity and applicability of base editing through protein engineering and protein delivery. Nat Commun 8, 15790, doi:10.1038/ncomms15790 (2017); Jin, S. et al. Cytosine, but not adenine, base editors induce genome-wide off-target mutations in rice. Science 364, 292-295, doi:10.1126/science.aaw7166 (2019); Zuo, E. et al. Cytosine base editor generates substantial off-target single-nucleotide variants in mouse embryos. Science 364, 289-292, doi:10.1126/science.aav9973 (2019); Lee, H. K., et al., Cytosine but not adenine base editor generates mutations in mice. Biorxiv, doi:https://doi.org/10.1101/731927 (2019); Grunewald, J. et al. Transcriptome-wide off-target RNA editing induced by CRISPR-guided DNA base editors. Nature 569, 433-437, doi:10.1038/s41586-019-1161-z (2019); Zhou, C. et al. Off-target RNA mutation induced by DNA base editing and its elimination by mutagenesis. Nature 571, 275-278, doi:10.1038/s41586-019-1314-0 (2019)).

[1070] Base editing at four on-target (FIGS. 25A and 25B) and twelve previously identified sgRNA-associated off-target loci in genomic DNA (Tsai, S. Q. et al. GUIDE-seq enables genome-wide profiling of off-target cleavage by CRISPR-Cas nucleases. Nat Biotechnol 33, 187-197, doi:10.1038/nbt.3117 (2015)) (FIGS. 25E and 25F) were measured, all of which were confirmed to be true Cas9 off-target loci in HEK293T cells (FIG. 26). As expected from their increased activity at on-target loci, ABE8 constructs exhibit 3-6-fold greater DNA off-target editing frequencies than ABE7.10. Whilst this is a caveat for use of ABE8 constructs, careful choice and analysis of the sgRNA can substantially decrease sgRNA-dependent off-target editing (see Tsai, S. Q. et al. GUIDE-seq enables genome-wide profiling of off-target cleavage by CRISPR-Cas nucleases. Nat Biotechnol 33, 187-197, doi:10.1038/nbt.3117 (2015); Yeh, W. H., et al., In vivo base editing of post-mitotic sensory cells. Nat Commun 9, 2184, doi:10.1038/s41467-018-04580-3 (2018)). For applications requiring use of promiscuous sgRNAs, installation of the DNA- and RNA-specificity enhancing V106W mutation (Rees, H. A., Wilson, C., Doman, J. L. & Liu, D. R. Analysis and minimization of cellular RNA editing by DNA adenine base editors. Sci Adv 5, eaax5717, doi:10.1126/sciadv.aax5717 (2019)) into the TadA domain of ABE8.17m can decrease the DNA off-target editing 2.6-fold while maintaining levels of on-target editing exceeding those of ABE7.10 (FIGS. 25C, 25D, 25G and 25H).

[1071] To measure the sgRNA-independent off-target activity of ABE8s, targeted amplification and high throughput sequencing of cellular RNAs was performed in HEK293T cells treated with ABEs (see Gaudelli, N. M. et al. Programmable base editing of A*T to G*C in genomic DNA without DNA cleavage. Nature 551, 464-471, doi:10.1038/nature24644 (2017); Rees, H. A., et al., Analysis and minimization of cellular RNA editing by DNA adenine base editors. Sci Adv 5, eaax5717, doi:10.1126/sciadv.aax5717 (2019)). In this assay, ABE8s displayed between 2.3-5.3-fold greater mean frequencies of cellular RNA adenosine deamination as compared to ABE7.10 (FIG. 25A).

[1072] To mitigate spurious RNA off target editing, previously published mutations (Grunewald, J. et al. CRISPR DNA base editors with reduced RNA off-target and self-editing activities. Nat Biotechnol 37, 1041-1048, doi:10.1038/s41587-019-0236-6 (2019); Rees, H. A., et al., Analysis and minimization of cellular RNA editing by DNA adenine base editors. Sci Adv 5, eaax5717, doi:10.1126/sciadv.aax5717 (2019); Grunewald, J. et al. Transcriptome-wide off-target RNA editing induced by CRISPR-guided DNA base editors. Nature 569, 433-437, doi:10.1038/s41586-019-1161-z (2019); Zhou, C. et al. Off-target RNA mutation induced by DNA base editing and its elimination by mutagenesis. Nature 571, 275-278, doi:10.1038/s41586-019-1314-0 (2019)) were installed into the TadA portion of the deaminase enzyme into ABE8.17-m to evaluate reductions in off-target editing frequencies. All of these mutations decreased the on-target editing frequencies of ABE8.17-m to differing extents, with V106W and F148A impairing ABE8 the least (FIGS. 25C and 25D). Of these, only V106W was able to substantially reduce the level of off-target RNA and DNA editing (FIG. 25B). Thus, the inclusion of the V106W mutation to ABE8 is applicable where transient perturbation of the cellular transcriptome must be avoided, or for use with promiscuous sgRNAs.

### Example 5: Adenine Base Editors for the Treatment of Hematological Disorders

[1073] ABE8 constructs were evaluated in human hematopoietic stem cells (HSC). Ex vivo manipulation and/or editing of HSCs prior to administration to patients as a cell therapy is a promising approach for the treatment of hematological disorders. It has been previously demonstrated that ABEs can introduce a T to C substitution at the −198 position of the promoter region of HBG1/2 (Gaudelli, N. M. et al. Programmable base editing of A*T to G*C in genomic DNA without DNA cleavage. Nature 551, 464-471, doi:10.1038/nature24644 (2017)). This naturally occurring allele yields Hereditary Persistence of Fetal Hemoglobin (HPFH) resulting in increased levels of γ-globin into adulthood, which can mitigate the defects in β-globin seen in sickle cell disease and β-thalassemia (Wienert, B. et al. KLF1 drives the expression of fetal hemoglobin in British HPFH. Blood 130, 803-807, doi:10.1182/blood-2017-02-767400 (2017)). With the goal of reproducing the HPFH phenotype and evaluating the clinical relevance of ABE8, CD34+ hematopoietic stem cells were isolated from two donors and transfected with mRNA encoding ABE8 editors and end-modified sgRNA placing the target A at position 7 within the protospacer.

[1074] The average ABE8 editing efficiencies at the −198 HBG1/2 promoter target site were 2-3x higher than either ABE7.10 construct at early time points (48h), and 1.3-2-fold higher than either ABE7.10 at the later time (144h) (FIG. 27A, FIG. 28, FIG. 29). These kinetic distinctions are clinically important for ex vivo therapies in which cell culturing must be kept to a minimum prior to administration of cell therapy.

[1075] Next, the amount of γ-globin protein produced following ABE treatment and erythrocyte differentiation was quantified by UPLC (FIGS. 30-50). A 3.5-fold average increase in % γ-globin/α-globin expression in erythrocytes derived from the ABE8 treatment groups was observed when compared to mock treated cells and about a 1.4-fold increase when comparing ABE8.13-d to levels achieved with ABE7.10-m/d (FIG. 27B). It is predicted that ≥20% HbF is required to ameliorate symptoms of sickle cell disease and β-thalassemia patients likely require even higher minimum levels (see e.g., Canver, M. C. & Orkin, S. H. Customizing the genome as therapy for the beta-hemoglobinopathies. Blood 127, 2536-2545, doi:10.1182/blood-2016-01-678128 (2016); Fitzhugh, C. D. et al. At least 20% donor myeloid chimerism is necessary to reverse the sickle phenotype after allogeneic HSCT. Blood 130, 1946-1948, doi:10.1182/blood-2017-03-772392 (2017)). The γ-globin levels observed following ABE8 treatment surpassed this threshold.

[1076] Overall, ABE8s recreated a naturally occurring hereditary persistence of fetal hemoglobin (HPFH) allele at the promoter of the 7-globin genes HBG1 and HBG2, achieving editing efficiencies of up to 60% in human CD34+ cell cultures and a corresponding upregulation of gamma globin expression in differentiated erythrocytes.

### Example 6: Complementary Base Editing Approaches for the Treatment of Sickle Cell Disease and Beta Thalassemia

[1077] Sickle cell disease (SCD) and Beta thalassemia are disorders of beta globin production and function that lead to severe anemia and significant disease complications across a multitude of organ systems. Autologous transplantation of hematopoietic stem cells engineered through the upregulation of fetal hemoglobin (HbF) or correction of the beta globin gene have the potential to reduce disease burden in patients with beta hemoglobinopathies. Base editing is a recently developed technology that enables precise modification of the genome without the introduction of double strand DNA breaks.

[1078] Gamma globin gene promoters were comprehensively screened with [[cytosine]] and adenine base editors (ABE) for the identification of alterations that would derepress HbF. Three regions were identified that significantly upregulated HbF, and the most effective nucleotide residue conversions are supported by natural variation seen in patients with hereditary persistence of fetal hemoglobin (HPFH). ABEs have been developed that significantly increase the level of HbF following nucleotide conversion at key regulatory motifs within the HBG1 and HBG2 promoters. CD34+ hematopoietic stem and progenitor cells (HSPC) were purified at clinical scale and edited using a process designed to preserve self-renewal capacity. Editing at two independent sites with different ABEs reached 94 percent and resulted in up to 63 percent gamma globin by UPLC (FIGS. 51A-51E). The levels of HbF observed should afford protection to the majority of SCD and Beta thalassemia patients based on clinical observations of HPFH and non-interventional therapy that links higher HbF dosage with milder disease (Ngo et al., 2011 Brit J Hem; Musallam et al., 2012 Blood).

[1079] Directly correcting the Glu6Val mutation of SCD has been a recent goal of genetic therapies designed for the SCD population. Current base editing technology cannot yet convert mutations like those that result from the A-T transversion in sickle beta globin; however, ABE variants have been designed to recognize and edit the opposite stranded adenine residue of valine. This results in the conversion of valine to alanine and the production of a naturally occurring variant known as Hb G-Makassar. Beta globin with alanine at this position does not contribute to polymer formation, and patients with Hb G-Makassar present with normal hematological parameters and red blood cell morphology. SCD patient fibroblasts edited with these ABE variants achieve up to 70 percent conversion of the target adenine (FIG. 52A). CD34 cells from healthy donors were then edited with a lead ABE variant, targeting a synonymous mutation in an adjacent proline that resides within the editing window and serves as a proxy for editing the SCD mutation. The average editing frequency was 40 percent (FIG. 52B). Donor myeloid chimerism documented at these levels in the allogeneic transplant setting exceeds the 20 percent that is required for reversing the sickle phenotype (Fitzhugh et al, 2017 Blood).

### Example 7: Materials and Methods

### General Methods:

[1080] All cloning was conducted via USER enzyme (New England Biolabs) cloning methods (see Geu-Flores et al., USER fusion: a rapid and efficient method for simultaneous fusion and cloning of multiple PCR products. Nucleic Acids Res 35, e55, doi:10.1093/nar/gkm106 (2007)) and templates for PCR amplification were purchased as bacterial or mammalian codon optimized gene fragments (GeneArt). Vectors created were transformed into Mach T1^{R} Competent Cells (Thermo Fisher Scientific) and maintained at −80 C for long-term storage. All primers used in this work were purchased from Integrated DNA Technologies and PCRS were carried out using either Phusion U DNA Polymerase Green MultiPlex PCR Master Mix (ThermoFisher) or Q5 Hot Start High-Fidelity 2× Master Mix (New England Biolabs). All plasmids used in this work were freshly prepared from 50 mL of Machi culture using ZymoPURE Plasmid Midiprep (Zymo Research Corporation) which involves an endotoxin removal procedure. Molecular biology grade, Hyclone water (GE Healthcare Life Sciences) was used in all assays, transfections, and PCR reactions to ensure exclusion of DNAse activity.

[1081] Amino acid sequences of sgRNAs used for Hek293T mammalian cell transfection are provided in Table 15 below. The 20-nt target protospacer is shown in bold font. When a target DNA sequence did not start with a ‘G,’ a ‘G’ was added to the 5′ end of the primer since it has been established that the human U6 promoter prefers a ‘G’ at the transcription start site (see Cong, L. et al., Multiplex genome engineering using CRISPR/Cas systems. Science 339, 819-823, doi:10.1126/science.1231143 (2013)). The pFYF sgRNA plasmid described previously was used as a template for PCR amplification.

TABLE 15
Sequences of sgRNAs used for Hek293T
mammalian cell transfection.

| Site | RNA protospacer sequence | Cas9 scaffold | PAM |
|---|---|---|---|
| 1 | GAACACAAAGCAUAGACUGC | S. pyogenes | NGG |
| 2 | GGGAAAGACCCAGCAUCCGU | S. pyogenes | NGG |
| 3 | GCUCCCAUCACAUCAACCGG | S. pyogenes | NGG |
| 4 | GGUGAGUGAGUGUGUGCGUG | S. pyogenes | NGG |
| 5 | GGCUUCAGGUUCUAAAUGAG | S. pyogenes | NGG |
| 6 | GCAGAGAGUCGCCGUCUCCA | S. pyogenes | NGG |
| 7 | GUGUAAGACCUCAAAAGCAC | S. pyogenes | NGG |
| 8 | GAUGAGAAGGAGAAGUUCUU | S. pyogenes | NGG |
| 9 | GAGGACAAAGUACAAACGGC | S. pyogenes | AGA |
| 10 | GCCACCACAGGGAAGCUGGG | S. pyogenes | TGA |
| 11 | GCUCUCAGGCCCUGUCCGCA | S. pyogenes | CGT |
| 12 | GAGCAAAUACCAGAGAUAAG | S. pyogenes | AGA |
| 13 | GAUCAGGAAAUAGAGCCACA | S. pyogenes | GGC |
| 14 | GCCCAUCCCUGAGUCCAGCG | S. pyogenes | AGC |
| 15 | GAACACGAAGACAUCUGAAGGUA | S. aureus | TTGAAT |
| 16 | GAUUUACAGCCUGGCCUUUGGGG | S. aureus | TCGGGT |
| 17 | GGAGAGAAAGAGAAGUUGAUUG | S. aureus | ATGGGT |
| 18 | GAGGGUGAGGGAUGAGAUAAUG | S. aureus | ATGAGT |
| 19 | GGUGGAGGAGGGUGCAUGGGGU | S. aureus | CAGAAT |
| 20 | GCUGUUGCAUGAGGAAAGGGAC | S. aureus | TAGAGT |
| HEK2 | GAACACAAAGCAUAGACUGC | S. pyogenes | CGG |
| HEK3 | GGCCCAGACUGAGCACGUGA | S. pyogenes | TGG |
| HEK4 | GGCACUGCGGCUGGAGGUGG | S. pyogenes | GGG |
| LDLR | GCAGAGCACUGGAAUUCGUCA | S. pyogenes | GGG |

sgRNA scaffold sequences are as follows:

S. pyogenes:
GUUUUAGAGCUAGAAAUAGCAAGUUAAAAUAAGGCUAGUCCGUUAUCAACU
UGAAAAAGUGGCACCGAGUCGGUGC
S. aureus:
GUUUUAGUACUCUGUAAUGAAAAUUACAGAAUCUACUAAAACAAGGCAAAA
UGCCGUGUUUAUCUCGUCAACUUGUUGGCGAGA

### Generation of Input Bacterial TadA* Libraries for Directed Evolution

[1082] The TadA*8.0 library was designed to encode all 20 amino acids at each amino acid position in the TadA*7.10 open reading frame (Gaudelli, N. M. et al., Programmable base editing of A*T to G*C in genomic DNA without DNA cleavage. Nature 551, 464-471, doi:10.1038/nature24644 (2017)). Each TadA*8.0 library member contained about 1-2 new coding mutations and was chemically synthesized and purchased from Ranomics Inc (Toronto, Canada). The TadA*8.0 library was PCR amplified with Phusion U Green MultiPlex PCR Master Mix and USER-assembled into a bacterial vector optimized for ABE directed evolution (Gaudelli, N. M. et al., Programmable base editing of A*T to G*C in genomic DNA without DNA cleavage. Nature 551, 464-471, doi:10.1038/nature24644 (2017)).

### Bacterial Evolution of TadA Variants

[1083] Directed evolution of ABE containing the TadA*8 library was conducted as previously described (Gaudelli, N. M. et al., Programmable base editing of A*T to G*C in genomic DNA without DNA cleavage. Nature 551, 464-471, doi:10.1038/nature24644 (2017)) with the following changes: i) E. coli 10 betas (New England Biolabs) were used as the evolution host; and ii) survival on kanamycin relied on correction of three genetic inactivating components (e.g. survival required reversion of two stop mutations and one active site mutation in kanamycin). The kanamycin resistance gene sequence contains selection mutations for ABE8 evolution. After overnight co-culturing of selection plasmid and editor in 10 beta host cells, the library cultures were plated on 2xYT-agar medium supplemented with plasmid maintenance antibiotic and increasing concentrations of selection antibiotic, kanamycin (64-512 μg/mL). Bacteria were allowed to grow for 1 day and the TadA*8 portion of the surviving clones were Sanger sequenced after enrichment. Identified TadA*8 mutations of interest were then were then incorporated into mammalian expression vector via USER assembly.

### General HEK293T and RPMI-8226 Mammalian Culture Conditions

[1084] Cells were cultured at 37° C. with 5% CO₂. HEK293T cells [CLBTx013, American Type Cell Culture Collection (ATCC)] were cultured in Dulbecco's modified Eagles medium plus Glutamax (10566-016, Thermo Fisher Scientific) with 10% (v/v) fetal bovine serum (A31606-02, Thermo Fisher Scientific). RPMI-8226 (CCL-155, ATCC) cells were cultured in RPMI-1640 medium (Gibco) with 10% (v/v) fetal bovine serum (Gibco). Cells were tested negative for mycoplasma after receipt from supplier.

Hek293T Plasmid Transfection and gDNA Extraction

[1085] HEK293T cells were seeded onto 48-well well Poly-D-Lysine treated BioCoat plates (Corning) at a density of 35,000 cells/well and transfected 18-24 hours after plating. Cells were counted using a NucleoCounter NC-200 (Chemometec). To these cells were added 750 ng of base editor or nuclease control, 250 ng of sgRNA, and 10 ng of GFP-max plasmid (Lonza) diluted to 12.5 μL total volume in Opti-MEM reduced serum media (ThermoFisher Scientific). The solution was combined with 1.5 μL of Lipofectamine 2000 (ThermoFisher) in 11 μL of Opti-MEM reduced serum media and left to rest at room temperature for 15 min. The entire 25 μL mixture was then transferred to the pre-seeded Hek293T cells and left to incubate for about 120 h. Following incubation, media was aspirated and cells were washed two times with 250 μL of 1×PBS solution (ThermoFisher Scientific) and 100 μL of freshly prepared lysis buffer was added (100 mM Tris-HCl, pH 7.0, 0.05% SDS, 25 μg/mL Proteinase K (Thermo Fisher Scientific). Transfection plates containing lysis buffer were incubated at 37° C. for 1 hour and the mixture was transferred to a 96-well PCR plate and heated at 80° C. for 30 min.

### Analysis of DNA and RNA Off-Target Editing for ABE Architecture and ABE8 Constructs

[1086] HEK293T cells were plated on 48-well poly-D-lysine coated plates (Corning) 16 to 20 hours before lipofection at a density of 30,000 cells per well in DMEM+Glutamax medium (Thermo Fisher Scientific) without antibiotics. 750 ng nickase or base editor expression plasmid DNA was combined with 250 ng of sgRNA expression plasmid DNA in 15 μl OPTIMEM+Glutamax. This was combined with 10 μl of lipid mixture, comprising 1.5 μl Lipofectamine 2000 and 8.5 μl OPTIMEM+Glutamax per well. Cells were harvested 3 days after transfection and either DNA or RNA was harvested. For DNA analysis, cells were washed once in 1×PBS, and then lysed in 100 μl QuickExtract™ Buffer (Lucigen) according to the manufacturer's instructions. For RNA harvest, the MagMAX™ mirVana™ Total RNA Isolation Kit (Thermo Fisher Scientific) was used with the KingFisher™ Flex Purification System according to the manufacturer's instructions.

[1087] Targeted RNA sequencing was performed largely as previously described (see Rees, H. A. et al., Analysis and minimization of cellular RNA editing by DNA adenine base editors. Sci Adv 5, eaax5717, doi:10.1126/sciadv.aax5717 (2019)). cDNA was prepared from the isolated RNA using the SuperScript IV One-Step RT-PCR System with EZDnase (Thermo Fisher Scientific) according to the manufacturer's instructions. The following program was used: 58° C. for 12 min; 98° C. for 2 min; followed by PCR cycles which varied by amplicon: for CTNNB1 and IP90: 32 cycles of [98° C. for 10 sec; 60° C. for 10 sec; 72° C. for 30 sec] and for RSL1D1 35 cycles of [98° C. for 10 sec; 58° C. for 10 sec; 72° C. for 30 sec]. No RT controls were run concurrently with the samples. Following the combined RT-PCR, amplicons were barcoded and sequenced using an Illumina Miseq as described above. The first 125 nt in each amplicon, beginning at the first base after the end of the forward primer in each amplicon, was aligned to a reference sequence and used for analysis of mean and maximum A-to-I frequencies in each amplicon (FIGS. 53A and 53B).

[1088] Off-target DNA sequencing was performed using previously published primers (see Komor, A. C. et al., Programmable editing of a target base in genomic DNA without double-stranded DNA cleavage. Nature 533, 420-424, doi:10.1038/nature17946 (2016); Rees, H. A. et al., Analysis and minimization of cellular RNA editing by DNA adenine base editors. Sci Adv 5, eaax5717, doi:10.1126/sciadv.aax5717 (2019)) listed in Table 16 below using a two-step PCR and barcoding method to prepare samples for sequencing using Illumina Miseq sequencers as above.

TABLE 16
HTS Primers used to amplify genomic sites:

| Primer Name | Sequence |
|---|---|
| fwd_site_1 | ACACTCTTTCCCTACACGACGCTCTTCCGATCTNNNNCCAGCCCCATCTGTCAAACT |
| rev_site_1 | TGGAGTTCAGACGTGTGCTCTTCCGATCTTGAATGGATTCCTTGGAAACAATGA |
| fwd_site_2 | ACACTCTTTCCCTACACGACGCTCTTCCGATCTNNNNTGAGGGAGAGCCGTGTAGTT |
| rev_site_2 | TGGAGTTCAGACGTGTGCTCTTCCGATCTGCCTCTCAAAGTGCTGGGAT |
| fwd_site_3 | ACACTCTTTCCCTACACGACGCTCTTCCGATCTNNNNCCATCAGGCTCTCAGCTCAG |
| rev_site_3 | TGGAGTTCAGACGTGTGCTCTTCCGATCTCTCGTGGGTTTGTGGTTGC |
| fwd_site_4 | ACACTCTTTCCCTACACGACGCTCTTCCGATCTNNNNGCCCATTCCCTCTTTAGCCA |
| rev_site_4 | TGGAGTTCAGACGTGTGCTCTTCCGATCTGAGCCGTTCCCTCTTTGCTA |
| fwd_site_5 | ACACTCTTTCCCTACACGACGCTCTTCCGATCTNNNNAACCTGTGTGACACTTGGCA |
| rev_site_5 | TGGAGTTCAGACGTGTGCTCTTCCGATCTGTCTGGCCCAAGATCACACA |
| fwd_site_6 | ACACTCTTTCCCTACACGACGCTCTTCCGATCTNNNCACGGATAAAGACGCTGGGA |
| rev_site_6 | TGGAGTTCAGACGTGTGCTCTTCCGATCTGGGGTCCCAGGTGCTGAC |
| fwd_site_7 | ACACTCTTTCCCTACACGACGCTCTTCCGATCTNNNTTGATTGTCTCCTTTGCCGC |
| rev_site_7 | TGGAGTTCAGACGTGTGCTCTTCCGATCTTGACCCAGTGTTTGATAGATCAGT |
| fwd_site_8 | ACACTCTTTCCCTACACGACGCTCTTCCGATCTNNNCACCCCTTCAGTCCATGCTT |
| rev_site_8 | TGGAGTTCAGACGTGTGCTCTTCCGATCTTCTGATGGGGAGGAACGAGT |
| fwd_site_9 | ACACTCTTTCCCTACACGACGCTCTTCCGATCTNNNNCAGCTCAGCCTGAGTGTTGA |
| rev_site_9 | TGGAGTTCAGACGTGTGCTCTTCCGATCTGCCCACCCTAGTCATTGGAG |
| fwd_site_10 | ACACTCTTTCCCTACACGACGCTCTTCCGATCTNNNNGTCAGAGGGACACACTGTGG |
| rev_site_l0 | TGGAGTTCAGACGTGTGCTCTTCCGATCTCACACTCACTCACCCACACA |
| fwd_site_l1 | ACACTCTTTCCCTACACGACGCTCTTCCGATCTNNNNTGTGTGGGTGAGTGAGTGTG |
| rev_site_11 | TGGAGTTCAGACGTGTGCTCTTCCGATCTCACCAAGGTTCACAGCCTGA |
| fwd_site_12 | ACACTCTTTCCCTACACGACGCTCTTCCGATCTNNNNTTGTCTCTGCCTGTAGCTGC |
| rev_site_12 | TGGAGTTCAGACGTGTGCTCTTCCGATCTCGCTCTGGGCTTCATCTTCA |
| fwd_site_13 | ACACTCTTTCCCTACACGACGCTCTTCCGATCTNNNNTGGGATTATGGGTGTGAGCC |
| rev_site_13 | TGGAGTTCAGACGTGTGCTCTTCCGATCTTGCCTTCCTCCTCTCTCTCC |
| fwd_site_14 | ACACTCTTTCCCTACACGACGCTCTTCCGATCTNNNNTGCAGACCAGATTCGGAGAA |
| rev_site_14 | TGGAGTTCAGACGTGTGCTCTTCCGATCTGTTCAGTTTCCAGGGGGTCC |
| fwd_site_15 | ACACTCTTTCCCTACACGACGCTCTTCCGATCTNNNNTCCGCACAGCCTTAGTTCAA |
| rev_site_15 | TGGAGTTCAGACGTGTGCTCTTCCGATCTAACTTGAAGAGACGGCAGCA |
| fwd_site_16 | ACACTCTTTCCCTACACGACGCTCTTCCGATCTNNNNCCCCCAGCTACAGAAAGGTC |
| rev_site_16 | TGGAGTTCAGACGTGTGCTCTTCCGATCTATTTCCACCGCAAAATGGCC |
| fwd_site_17 | ACACTCTTTCCCTACACGACGCTCTTCCGATCTNNNNTCACTTCAGCCCAGGAGTAT |
| rev_site_17 | TGGAGTTCAGACGTGTGCTCTTCCGATCTTGTGTATGGTGAGAGGTAGGGA |
| fwd_site_18 | ACACTCTTTCCCTACACGACGCTCTTCCGATCTNNNNGTCTGAGGTCACACAGTGGG |
| rev_site_18 | TGGAGTTCAGACGTGTGCTCTTCCGATCTCTGAGAGCAGGGACCACATC |
| fwd_site_19 | ACACTCTTTCCCTACACGACGCTCTTCCGATCTNNNNGGGAGGTGGAGAGAGGATGT |
| rev_site_19 | TGGAGTTCAGACGTGTGCTCTTCCGATCTACTCTTCCTGAGGTCTAGGAACCCG |
| fwd_site_20 | ACACTCTTTCCCTACACGACGCTCTTCCGATCTNNNNCCCTGTTCCTAAAGCCCACC |
| rev_site_20 | TGGAGTTCAGACGTGTGCTCTTCCGATCTACTCTCTGGTTCTGTTTGTGGCCA |
| fwd CTNNB1 | ACACTCTTTCCCTACACGACGCTCTTCCGATCTNNNNATTTGATGGAGTTGGACATG |
| | GCC |
| rev_CTNNB1 | TGGAGTTCAGACGTGTGCTCTCCAGCTACTTGTTCTTGAGTGAAGG |
| fwd_RSL1D1 | ACACTCTTTCCCTACACGACGCTCTTCCGATCTNNNNTGGCTTTCCAAATCAGTGGG |
| | TC |
| rev_RSL1D1 | TGGAGTTCAGACGTGTGCTCTTCCGATCTCTCATAAGCTTAGACCAACAAGC |
| fwd_IP90 | ACACTCTTTCCCTACACGACGCTCTTCCGATCTNNNNCTGGTTGACCAATCTGTGGT |
| | G |
| rev_IP90 | TGGAGTTCAGACGTGTGCTCTCTGCGTCTGGATCAGGTACG |
| fwd_HEK293_site2_off1 | ACACTCTTTCCCTACACGACGCTCTTCCGATCTNNNNGTGTGGAGAGTGAGTAAGCC |
| | A |
| rev_HEK293_site2_off1 | TGGAGTTCAGACGTGTGCTCTTCCGATCTACGGTAGGATGATTTCAGGCA |
| fwd_HEK293_site2_off2 | ACACTCTTTCCCTACACGACGCTCTTCCGATCTNNNNCACAAAGCAGTGTAGCTCAG |
| | G |
| rev_HEK293_site2_off2 | TGGAGTTCAGACGTGTGCTCTTCCGATCTTTTTTGGTACTCGAGTGTTATTCAG |
| fwd_HEK293_site3_off1 | ACACTCTTTCCCTACACGACGCTCTTCCGATCTNNNNTCCCCTGTTGACCTGGAGAA |
| rev_HEK293_site3_off1 | TGGAGTTCAGACGTGTGCTCTTCCGATCTCACTGTACTTGCCCTGACCA |
| fwd_HEK293_site3_off2 | ACACTCTTTCCCTACACGACGCTCTTCCGATCTNNNNTTGGTGTTGACAGGGAGCAA |
| rev_HEK293_site3_off2 | TGGAGTTCAGACGTGTGCTCTTCCGATCTCTGAGATGTGGGCAGAAGGG |
| fwd_HEK293_site3_off3 | ACACTCTTTCCCTACACGACGCTCTTCCGATCTNNNNTGAGAGGGAACAGAAGGGCT |
| rev_HEK293_site3_off3 | TGGAGTTCAGACGTGTGCTCTTCCGATCTGTCCAAAGGCCCAAGAACCT |
| fwd_HEK293_site3_off4 | ACACTCTTTCCCTACACGACGCTCTTCCGATCTNNNNTCCTAGCACTTTGGAAGGTC |
| | G |
| rev_HEK293_site3_off4 | TGGAGTTCAGACGTGTGCTCTTCCGATCTGCTCATCTTAATCTGCTCAGCC |
| fwd_HEK293_site3_off5 | ACACTCTTTCCCTACACGACGCTCTTCCGATCTNNNNAAAGGAGCAGCTCTTCCTGG |
| rev_HEK293_site3_off5 | TGGAGTTCAGACGTGTGCTCTTCCGATCTGTCTGCACCATCTCCCACAA |
| fwd_HEK293_site4_off1 | ACACTCTTTCCCTACACGACGCTCTTCCGATCTNNNNGGCATGGCTTCTGAGACTCA |
| rev_HEK293_site4_off1 | TGGAGTTCAGACGTGTGCTCTTCCGATCTGTCTCCCTTGCACTCCCTGTCTTT |
| fwd_HEK293_site4_off2 | ACACTCTTTCCCTACACGACGCTCTTCCGATCTNNNNTTTGGCAATGGAGGCATTGG |
| rev_HEK293_site4_off2 | TGGAGTTCAGACGTGTGCTCTTCCGATCTGAAGAGGCTGCCCATGAGAG |
| fwd_HEK293_site4_off3 | ACACTCTTTCCCTACACGACGCTCTTCCGATCTNNNNGGTCTGAGGCTCGAATCCTG |
| rev_HEK293_site4_off3 | TGGAGTTCAGACGTGTGCTCTTCCGATCTCTGTGGCCTCCATATCCCTG |
| fwd_HEK293_site4_off4 | ACACTCTTTCCCTACACGACGCTCTTCCGATCTNNNNTTTCCACCAGAACTCAGCCC |
| rev_HEK293_site4_off4 | TGGAGTTCAGACGTGTGCTCTTCCGATCTCCTCGGTTCCTCCACAACAC |
| fwd_HEK293_site4_off5 | ACACTCTTTCCCTACACGACGCTCTTCCGATCTNNNNCACGGGAAGGACAGGAGAAG |
| rev_HEK293_site4_off5 | TGGAGTTCAGACGTGTGCTCTTCCGATCTGCAGGGGAGGGATAAAGCAG |
| fwd_HEK_site-3 | ACACTCTTTCCCTACACGACGCTCTTCCGATCTNNNNGGAAACGCCCATGCAATTAG |
| | TC |
| rev_HEK_site_3 | TGGAGTTCAGACGTGTGCTCTTCCGATCTCTTGTCAACCAGTATCCCGGTG |
| fwd_HEK_site-2 | ACACTCTTTCCCTACACGACGCTCTTCCGATCTNNNNTGAATGGATTCCTTGGAAAC |
| | AATG |
| rev_HEK_site_2 | TGGAGTTCAGACGTGTGCTCTTCCGATCTCCAGCCCCATCTGTCAAACT |
| fwd_HEK_site_4 | TGGAGTTCAGACGTGTGCTCTTCCGATCTTCCTTTCAACCCGAACGGAG |
| rev_HEK_site_4 | ACACTCTTTCCCTACACGACGCTCTTCCGATCTNNNNGCTGGTCTTCTTTCCCCTCC |
| fwd_LDLR | ACACTCTTTCCCTACACGACGCTCTTCCGATCTNNNNGCCCTGCTTCTTTTTCTCTG |
| | GT |
| rev_LDLR | TGGAGTTCAGACGTGTGCTCTTCCGATCTACCATTAACGCAGCCAACTTCA |
| fwd_TRAC | ACACTCTTTCCCTACACGACGCTCTTCCGATCTCATGAGGTCTATGGACTTCAAGAG |
| | CAA |
| Rev_TRAC | TGGAGTTCAGACGTGTGCTCTTCCGATCTCATCATTGACCAGAGCTCTGGGCAGAA |
| fwd_CBLB | ACACTCTTTCCCTACACGACGCTCTTCCGATCTGCACTTACCAGCATTACTTCCTAA |
| | ACC |
| Rev_CBLB | TGGAGTTCAGACGTGTGCTCTTCCGATCTATGGGCTCCACTTTTCAGCTCTGTAA |
| fwd_CD7 | ACACTCTTTCCCTACACGACGCTCTTCCGATCTCAGTTCAGGCACATGTAGGAGGGA |
| Rev_CD7 | TGGAGTTCAGACGTGTGCTCTTCCGATCTACCGCCTGCAGCTGTCGGACACTGGCA |
| fwd_B2M | ACACTCTTTCCCTACACGACGCTCTTCCGATCTAAAAGATGAGTATGCCTGCCGTG |
| Rev_B2M | TGGAGTTCAGACGTGTGCTCTTCCGATCTCAGATTGTTTATATCAGATGGGATGGG |
| fwd_CIITA | ACACTCTTTCCCTACACGACGCTCTTCCGATCTATGCAAGTTTGGTCCTGAGCCCTC |
| | CC |
| Rev_CIITA | TGGAGTTCAGACGTGTGCTCTTCCGATCTGATGTGGGTTCCCTGCGCTCTGCA |
| fwd PDCD1 | ACACTCTTTCCCTACACGACGCTCTTCCGATCTCCAGGGACTGAGGGTGGAAGGTCC |
| Rev_PDCD1 | TGGAGTTCAGACGTGTGCTCTTCCGATCTACCTCCGCCTGAGCAGTGGAGAA |

mRNA Production for ABE Editors Used in CD34+ Cells

[1089] Editors were cloned into a plasmid encoding a dT7 promoter followed by a 5′UTR, Kozak sequence, ORF, and 3′UTR. The dT7 promoter carries an inactivating point mutation within the T7 promoter that prevents transcription from circular plasmid. This plasmid templated a PCR reaction (Q5 Hot Start 2X Master Mix), in which the forward primer corrected the SNP within the T7 promoter and the reverse primer appended a 120A tail to the 3′ UTR. The resulting PCR product was purified on a Zymo Research 25 μg DCC column and used as mRNA template in the subsequent in vitro transcription. The NEB HiScribe High-Yield Kit was used as per the instruction manual but with full substitution of N1-methyl-pseudouridine for uridine and co-transcriptional capping with CleanCap AG (Trilink). Reaction cleanup was performed by lithium chloride precipitation. Primers used for amplification can be found in Table 17.

TABLE 17
Primers used for ABE8 T7 in vitro
transcription reactions

| Name | Sequence |
|---|---|
| fwd_IVT | TCGAGCTCGGTACCTAATACGACTCAC |
| rev_IVT | TTTTTTTTTTTTTTTTTTTTTTTTTTTTTTTTTTTTTTTTTT |
| | TTTTTTTTTTTTTTTTTTTTTTTTTTTTTTTTTTTTTTTTTT |
| | TTTTTTTTTTTTTTTTTTTTTTTTTTTTTTTTTTTTCTTCCT |
| | ACTCAGGCTTTATTCAAAGACCA |

### CD34+ Cell Preparation

[1090] Mobilized peripheral blood was obtained and enriched for Human CD34+ HSPCs (HemaCare, M001F-GCSF/MOZ-2). The CD34+ cells were thawed and put into X-VIVO 10 (Lonza) containing 1% Glutamax (Gibco), 100 ng/mL of TPO (Peprotech), SCF (Peprotech) and Flt-3 (Peprotech) at 48 hours prior to electroporation

### Electroporation of CD34+ Cells

[1091] 48 hours post thaw, the cells were spun down to remove the X-VIVO 10 media and washed in MaxCyte buffer (HyClone) with 0.1% HSA (Akron Biotechnologies). The cells were then resuspended in cold MaxCyte buffer at 1,250,000 cells per mL and split into multiple 20 μL aliquots. The ABE mRNA (0.15 μM) and −198 HBG1/2 sgRNA (4.05 μM) were then aliquoted as per the experimental conditions and raised to a total of 5 μL in MaxCyte buffer. The 20 μL of cells was the added into the 5 μL RNA mixture in groups of 3 and loaded into each chamber of an OC25x3 MaxCyte cuvette for electroporation. After receiving the charge, 25 μL was collected from the chambers and placed in the center of the wells in a 24-well untreated culture plate. The cells recovered for 20 minutes in an incubator (37° C., 5% CO₂). After the 20 minutes recovery, X-VIVO 10 containing 1% Glutamax, 100 ng/mL of TPO, SCF and Flt-3 was added to the cells for a concentration of 1,000,000 cells per mL. The cells were then left to further recover in an incubator (37° C., 5% CO₂) for 48 hrs.

### Erythrocyte Differentiation Post ABE Electroporation

[1092] Following 48 h post electroporation rest (day 0 of culture), the cells were spun down and moved to “Phase 1” IMDM media (ATCC) containing 5% human serum, 330 μg/mL transferrin (Sigma), 10 μg/mL human insulin (Sigma), 2U/mL heparin sodium (Sigma), 3U/mL EPO (Peprotech), 100 ng/mL SCF (Peprotech), 5 μg/mL IL3 and 50 μM hydrocortisone (Sigma) at 20,000 cells per mL. On day 4 of culture, the cells were fed 4× volume of the same media. On day 7, the cells were spun down and moved to “Phase 2” IMDM media containing 5% human serum (Sigma), 330 μg/mL transferrin, 10 μg/mL human insulin, 2U/mL heparin sodium, 3U/mL EPO and 100 ng/mL SCF at 200,000 cells per mL. On day 11, cells were spun down and moved to “Phase 3” IMDM media containing 5% human serum, 330 μg/mL of transferrin, 10 μg/mL human insulin, 2 U/mL of heparin sodium and 3 U/mL of EPO at 1,000,000 cells per mL. On day 14, the cells were spun down and resuspended in the same media as day 11 but at 5,000,000 cells per mL. On day 18, the differentiated red blood cells were collected in 500,000 cell aliquots, washed once in 500 μL DPBS (Gibco) and frozen at −80° C. for 24 hours before UHPLC processing.

### Preparation of Red Blood Cell Sample for UHPLC Analysis

[1093] Frozen red blood cell pellets were thawed at room temperature. Pellets were diluted to a final concentration of 5×10⁴ cells/μL with ACK lysis buffer. Samples were mixed by pipette and incubated at room temperate for 5 min. Samples were then frozen in at −80° C. for 5 min, allowed to thaw, and mixed by pipette prior to centrifugation at 6,700g for 10 min. The supernatant was carefully removed (without disturbing cell debris pellet), transferred to a new plate and diluted to 5×10′ cells/μL in ultrapure water for UHPLC analysis.

### Ultra-High Performance Liquid Chromatography (UHPLC) Analysis

[1094] Reverse-phase separation of globin chains was performed on a UHPLC system configured with a binary pump and UV detector (Thermo Fisher Scientific, Vanquish Horizon). The stationary phase consisted of an ACQUITY Peptide BEH C18 Column (2.1×150 mm, 1.7 μm beads, 300A pores) after an AQUITY Peptide BEH C18 VanGuard pre-column (2.1×5 mm, 1.7 μm beads, 300A pores)(both Waters Corp) with a column temperature of 60° C. Elution was preformed using 0.1% trifluoroacetic acid (TFA) in water (A) and 0.08% TFA in acetonitrile (B) with a flow rate of 0.25 mL/min. Separation of the globin chains was achieved using a linear gradient of 40-52% B from 0-10 min; 52-40% B from 10-10.5 min; 40% B to 12 min. Sample injection volume was 10 μL, UV spectra at a wavelength of 220 nm with a data rate of 5 Hz was collected throughout the analysis. Globin chain identities were confirmed through LC/MS analysis of hemoglobin standards.

### Genomic DNA Extraction for CD34+ Cells

[1095] Following ABE electroporation (48h later), an aliquot of cells was cultured in X-VIVO 10 media (Lonza) containing 1% Glutamax (Gibco), 100 ng/mL of TPO (Peprotech), SCF (Peprotech) and Flt-3 (Peprotech). Following 48 h and 144 h post culturing, 100,000 cells were collected and spun down. 50 μL of Quick Extract (Lucigen) was added to the cell pellet and the cell mixture was transferred to a 96-well PCR plate (Bio-Rad). The lysate was heated for 15 minutes at 65° C. followed by 10 minutes at 98° C. The cell lysates were stored at −20° C.

### Example 8: Splice Acceptor Disruption Using Adenosine Deaminase Base Editors for Disrupting or Silencing SOD1 Gene Expression in Cells

[1096] An abundant enzyme within cells, e.g., motor neurons, under normal circumstances, the SOD1 protein protects from the effects of metabolic waste that damage cells if not rendered harmless. ALS does not appear to be caused by lack of function of the SOD1 protein, since deleting the gene in animal models does not cause disease. Instead, mutations in the SOD1 gene appear to result in the gain of a new toxic function of the SOD1 protein, which may be associated with an increase in the tendency of mutant SOD1 proteins to aggregate and form deposits in motor neurons and astrocytes, namely, the cells that die in ALS. As protein aggregates form, they can trap other proteins that typically maintain cell health. Mutant SOD1 protein may trap other proteins in ALS, causing toxicity. Alternatively, the toxicity of aggregates could arise by clogging the cellular proteosomes and the lysosomes, resulting in the death of motor neurons.

[1097] In this Example, an spCas9 nickase-derived adenosine base editor (ABE) system was used to introduce a precise A-to-G mutation in the highly conserved splice acceptor “AG” nucleic acid sequence at the 5′ end of exon 3 of the SOD1 gene. The A-to-G base change in the “AG” nucleic acid sequence of the canonical splice acceptor site induces messenger RNA (mRNA) missplicing and gene transcription disruption and/or alternative splicing of exon 3 of the SOD1 gene.

[1098] ABEs were used to disrupt the canonical “AG” splice acceptor by efficiently targeting the “A” nucleobase in the AG splice acceptor in the SOD1 genomic nucleic acid sequence and converting A>G at the targeted site. Base editing was tested in the HEK293T cell line. The guide RNA (gRNA) was used to target adenosine (“A”) of the “AG” splice acceptor nucleic acid in conjunction with ABE8 base editor variants, namely, ABE8.1-ABE8.14, and ABE7.10 (FIG. 54).

[1099] The gRNA encompassed the scaffold sequence and the spacer sequence (target sequence) for the splice acceptor nucleic acid sequence (“AG”) of the human SOD1 gene associated with ALS, (namely, the splice acceptor 5′ of exon 3 of SOD1) as provided herein, or as determined based on the knowledge of the skilled practitioner and as would be understood to the skilled practitioner in the art. (See, e.g., Komor, A. C., et al., “Programmable editing of a target base in genomic DNA without double-stranded DNA cleavage” Nature 533, 420-424 (2016); Gaudelli, N. M., et al., “Programmable base editing of A⋅T to G⋅C in genomic DNA without DNA cleavage” Nature 551, 464-471 (2017); Komor, A. C., et al., “Improved base excision repair inhibition and bacteriophage Mu Gam protein yields C:G-to-T:A base editors with higher efficiency and product purity” Science Advances 3:eaao4774 (2017), and Rees, H. A., et al., “Base editing: precision chemistry on the genome and transcriptome of living cells.” Nat Rev Genet. 2018 December; 19(12):770-788. doi: 10.1038/s41576-018-0059-1).

[1100] In FIG. 55, the target adenosine (A) nucleobase converted to guanosine (G) in the intronic splice acceptor sequence 5′ of exon 3 of the SOD1 genomic DNA is shown, i.e., 5′-TTATAAATAGGCTGTACCAGTGCAG-3′. In addition, the guide RNA nucleic acid sequence used in the base editor system includes the sequence shown in FIG. 55: gRNA: 5′-AAUAUUUAUCCGACAUGGUCACGUC-3′. The PAM sequence used was an NGG PAM (i.e., spCas9), where N may be any one of G, A, C, or T (FIG. 55). For the gRNAs, the scaffold sequence is as follows:

GTTTTAGAGCTAGAAATAGCAAGTTAAAATAAGGCTAGTCCGTTATCAACT
TGAAAAAGTGGCACCGAGTCGGTGCTTTTTTT.

[1101] The first 4 amino acids encoded by exon 3 of the SOD1 nucleic acid sequence are shown in FIG. 55, as follows: 5′-Gly-Cys-Thr-Ser-Ala-3′.

[1102] The ABE base editors used included ABE8 variants: ABE8.1, ABE8.2, ABE8.2, ABE8.3, ABE8.4, ABE8.5, ABE8.6, ABE8.7, ABE8.8, ABE8.9, ABE8.10, ABE8.11, ABE8.12, ABE8.13 and ABE8.14 (see Table 7). Positive control base editor ABE7.10 and a negative control were also used for reference comparisons.

[1103] As seen in FIG. 56, all of the ABE base editors used provided efficient A-to-G base editing at the target site splice acceptor site using the gRNA as shown. All of the ABE8 base editor variants assayed had base editing activity compared with control. While the ABE8.5 showed about 40% A-to-G base editing activity, all of the other ABE8 variants showed over 75% A-to-G base editing activity or greater.

[1104] The efficiency of A to G base editing of the target SOD1 splice acceptor (AG) at position 6 (FIG. 55) as detected by deep sequencing of PCR products is presented in FIG. 56. As shown in FIG. 56, approximately 81% A-to-G base editing was achieved at position 6, the targeted splice acceptor site. Off-target effects (i.e., A-to-G editing of bystander “A” nucleobases in the SOD1 intron) associated with the ABE8 adenosine deaminases tested are shown (percent “G” nucleobases at positions 2-4 in FIG. 56), but are significantly less than the percent of A-to-G base editing at target position 6.

Single guide RNAs (sgRNAs) for base editing SOD1 gene splice acceptor

[1105] Examples of additional single guide RNA (sgRNA) nucleic acid sequences for SOD1 splice acceptor disruption suitable for use in the systems and methods described herein are set forth below. These sgRNAs begin at “U6” (“T” nucleobases are presented instead of “U” nucleobases in the nucleic acid sequences shown), which is complementary to the target adenosine (A) sequence of the splice acceptor “AG” sequence of the SOD1 genomic nucleic acid sequence shown in FIG. 55. The target “A” nucleobase of the SOD1 exon 3 splice acceptor “AG” sequence at position 6 of the sequence shown in FIG. 55 is indicated by the upward arrow in the figure. The sgRNAs presented below include the sgRNA scaffold sequence.

Guide 16 (U6 through sgRNA scaffold)
TACGTGACGTAGAAAGTAATAATTTCTTGGGTAGTTTGCAGTTTTAAAATTATGTTTTAAAATGGACTATCATAT
GCTTACCGTAACTTGAAAGTATTTCGATTTCTTGGCTTTATATATCTTGTGGAAAGGACGAAACACCGCCTTGCC
TTCTGCTCGAAATGTTTTAGAGCTAGAAATAGCAAGTTAAAATAAGGCTAGTCCGTTATCAACTTGAAAAAGTGG
CACCGAGTCGGTGCTTTTTTT
Guide 17 (U6 through sgRNA scaffold)
TACGTGACGTAGAAAGTAATAATTTCTTGGGTAGTTTGCAGTTTTAAAATTATGTTTTAAAATGGACTATCATAT
GCTTACCGTAACTTGAAAGTATTTCGATTTCTTGGCTTTATATATCTTGTGGAAAGGACGAAACACCGTGCAGGG
CATCATCAATTTGTTTTAGAGCTAGAAATAGCAAGTTAAAATAAGGCTAGTCCGTTATCAACTTGAAAAAGTGGC
ACCGAGTCGGTGCTTTTTTT
Guide 18 (U6 through sgRNA scaffold)
TACGTGACGTAGAAAGTAATAATTTCTTGGGTAGTTTGCAGTTTTAAAATTATGTTTTAAAATGGACTATCATAT
GCTTACCGTAACTTGAAAGTATTTCGATTTCTTGGCTTTATATATCTTGTGGAAAGGACGAAACACCGTTAAAGG
AAAGTAATGGACCGTTTTAGAGCTAGAAATAGCAAGTTAAAATAAGGCTAGTCCGTTATCAACTTGAAAAAGTGG
CACCGAGTCGGTGCTTTTTTT
Guide 19 (U6 through sgRNA scaffold)
TACGTGACGTAGAAAGTAATAATTTCTTGGGTAGTTTGCAGTTTTAAAATTATGTTTTAAAATGGACTATCATAT
GCTTACCGTAACTTGAAAGTATTTCGATTTCTTGGCTTTATATATCTTGTGGAAAGGACGAAACACCGTTACTTT
CCTTTAAGAAAAGGTTTTAGAGCTAGAAATAGCAAGTTAAAATAAGGCTAGTCCGTTATCAACTTGAAAAAGTGG
CACCGAGTCGGTGCTTTTTTT
Guide 20 (U6 through sgRNA scaffold)
TACGTGACGTAGAAAGTAATAATTTCTTGGGTAGTTTGCAGTTTTAAAATTATGTTTTAAAATGGACTATCATAT
GCTTACCGTAACTTGAAAGTATTTCGATTTCTTGGCTTTATATATCTTGTGGAAAGGACGAAACACCGTAAATAG
GCTGTACCAGTGCGTTTTAGAGCTAGAAATAGCAAGTTAAAATAAGGCTAGTCCGTTATCAACTTGAAAAAGTGG
CACCGAGTCGGTGCTTTTTTT
Guide 21 (U6 through sgRNA scaffold)
TACGTGACGTAGAAAGTAATAATTTCTTGGGTAGTTTGCAGTTTTAAAATTATGTTTTAAAATGGACTATCATAT
GCTTACCGTAACTTGAAAGTATTTCGATTTCTTGGCTTTATATATCTTGTGGAAAGGACGAAACACCGGTACAGC
CTATTTATAAGAGTTTTAGAGCTAGAAATAGCAAGTTAAAATAAGGCTAGTCCGTTATCAACTTGAAAAAGTGGC
ACCGAGTCGGTGCTTTTTTT
Guide 22 (U6 through sgRNA scaffold)
TACGTGACGTAGAAAGTAATAATTTCTTGGGTAGTTTGCAGTTTTAAAATTATGTTTTAAAATGGACTATCATAT
GCTTACCGTAACTTGAAAGTATTTCGATTTCTTGGCTTTATATATCTTGTGGAAAGGACGAAACACCGATGCTTC
CCCACACCTTCACGTTTTAGAGCTAGAAATAGCAAGTTAAAATAAGGCTAGTCCGTTATCAACTTGAAAAAGTGG
CACCGAGTCGGTGCTTTTTTT
Guide 24 (U6 through sgRNA scaffold)
TACGTGACGTAGAAAGTAATAATTTCTTGGGTAGTTTGCAGTTTTAAAATTATGTTTTAAAATGGACTATCATAT
GCTTACCGTAACTTGAAAGTATTTCGATTTCTTGGCTTTATATATCTTGTGGAAAGGACGAAACACCGTTCATTA
TTAGGCATGTTGGGTTTTAGAGCTAGAAATAGCAAGTTAAAATAAGGCTAGTCCGTTATCAACTTGAAAAAGTGG
CACCGAGTCGGTGCTTTTTTT
Guide 25 (U6 through sgRNA scaffold)
TACGTGACGTAGAAAGTAATAATTTCTTGGGTAGTTTGCAGTTTTAAAATTATGTTTTAAAATGGACTATCATAT
GCTTACCGTAACTTGAAAGTATTTCGATTTCTTGGCTTTATATATCTTGTGGAAAGGACGAAACACCGAACATGC
CTAATAATGAAAAGTTTTAGAGCTAGAAATAGCAAGTTAAAATAAGGCTAGTCCGTTATCAACTTGAAAAAGTGG
CACCGAGTCGGTGCTTTTTTT
Guide 39 (U6 through sgRNA scaffold)
TACGTGACGTAGAAAGTAATAATTTCTTGGGTAGTTTGCAGTTTTAAAATTATGTTTTAAAATGGACTATCATAT
GCTTACCGTAACTTGAAAGTATTTCGATTTCTTGGCTTTATATATCTTGTGGAAAGGACGAAACACCGTTCCTTT
AAGAAAAGTGCAAGTTTTAGAGCTAGAAATAGCAAGTTAAAATAAGGCTAGTCCGTTATCAACTTGAAAAAGTGG
CACCGAGTCGGTGCTTTTTTT
Guide 40 (U6 through sgRNA scaffold)
TACGTGACGTAGAAAGTAATAATTTCTTGGGTAGTTTGCAGTTTTAAAATTATGTTTTAAAATGGACTATCATAT
GCTTACCGTAACTTGAAAGTATTTCGATTTCTTGGCTTTATATATCTTGTGGAAAGGACGAAACACCGACAGCCT
ATTTATAAGAAGAGTTTTAGAGCTAGAAATAGCAAGTTAAAATAAGGCTAGTCCGTTATCAACTTGAAAAAGTGG
CACCGAGTCGGTGCTTTTTTT
Guide 41 (U6 through sgRNA scaffold)
TACGTGACGTAGAAAGTAATAATTTCTTGGGTAGTTTGCAGTTTTAAAATTATGTTTTAAAATGGACTATCATAT
GCTTACCGTAACTTGAAAGTATTTCGATTTCTTGGCTTTATATATCTTGTGGAAAGGACGAAACACCGAAATAGG
CTGTACCAGTGCAGTTTTAGAGCTAGAAATAGCAAGTTAAAATAAGGCTAGTCCGTTATCAACTTGAAAAAGTGG
CACCGAGTCGGTGCTTTTTTT
Guide 42 (U6 through sgRNA scaffold)
TACGTGACGTAGAAAGTAATAATTTCTTGGGTAGTTTGCAGTTTTAAAATTATGTTTTAAAATGGACTATCATAT
GCTTACCGTAACTTGAAAGTATTTCGATTTCTTGGCTTTATATATCTTGTGGAAAGGACGAAACACCGTATTAGG
CATGTTGGAGACTGTTTTAGAGCTAGAAATAGCAAGTTAAAATAAGGCTAGTCCGTTATCAACTTGAAAAAGTGG
CACCGAGTCGGTGCTTTTTTT

[1106] The below tables present results of SOD1 splice acceptor base editing using several of the sgRNAs shown above. In Table 19, percent base editing at the target site is presented for several gRNAs and ABEs.

TABLE 19

| | | | Highest Average |
|---|---|---|---|
| Guide | Guide wiUh PAM Bold | Base Editor | Editing Obtained (%) |
| SOD1 “Guide 16” | CCUUGCCUUCUGCUCGAAAUUGA | CBE | |
| SOD1 “Guide 17” | GUGCAGGGCAUCAUCAAUUUCGA | CBE | |
| SOD1 “Guide 18” | UUAAAGGAAAGUAAUGGACCAGU | ABE | |
| SOD1 “Guide 19” | UUACUUUCCUUUAAGAAAAGUGC | CBE | |
| SOD1 “Guide 20” | UAAAUAGGCUGUACCAGUGCAGG | ABE | ABE: 55.60 |
| SOD1 “Guide 21” | GGUACAGCCUAUUUAUAAGAAGA | CBE | |
| SOD1 “Guide 22” | AUGCUUCCCCACACCUUCACUGG | CBE | |
| SOD1 “Guide 24” | UUCAUUAUUAGGCAUGUUGGAGA | ABE | |
| SOD1 “Guide 25” | AACAUGCCUAAUAAUGAAAAAGC | CBE | |
| SOD1 “Guide 39” | UUCCUUUAAGAAAAGUGCAAAGU | CBE | |
| SOD1 “Guide 40” | ACAGCCUAUUUAUAAGAAGAAGA | CBE | |
| SOD1 “Guide 41” | AAAUAGGCUGUACCAGUGCAGGU | ABE | ABE: 47.71 |
| SOD1 “Guide 42” | UAUUAGGCAUGUUGGAGACUUGG | ABE | ABE: 54.91 |

[1107] The percent of A to G base editing achieved at the target site by several different ARE8 (or ABE7.10) adenosine base editors as described herein and sgRNA “Guide 20” compared with controls is shown in Table 20 below.

TABLE 20

| | “Guide 20” ABE Average (Total) % |
|---|---|
| ABE8.1 | 55.29 |
| ABE8.2 | 54.03 |
| ABE8.3 | 52.72 |
| ABE8.4 | 51.55 |
| ABE8.5 | 33.80 |
| ABE8.6 | 55.60 |
| ABE8.7 | 37.71 |
| ABE8.8 | 15.31 |
| ABE8.9 | 13.49 |
| ABE8.10 | 31.43 |
| ABE8.11 | 29.21 |
| ABE8.12 | 47.53 |
| ABE8.13 | 7.10 |
| ABE8.14 | 16.63 |
| ABE7.10 | 46.51 |
| Control | 0.02 |

[1108] The percent of A to G base editing at the target site achieved by several different ABE8 (or ABE7.10) adenosine base editors as described herein and sgRNA “Guide 42” compared with controls is shown in Table 21 below.

TABLE 21

| | “Guide 42”-ABE Average (Total) % |
|---|---|
| ABE8.1 | 48.96 |
| ABE8.2 | 54.21 |
| ABE8.3 | 48.77 |
| ABE8.4 | 54.14 |
| ABE8.5 | 18.57 |
| ABE8.6 | 48.69 |
| ABE8.7 | 48.02 |
| ABE8.8 | 54.13 |
| ABE8.9 | 41.04 |
| ABE8.10 | 47.89 |
| ABE8.11 | 54.91 |
| ABE8.12 | 52.15 |
| ABE8.13 | 50.45 |
| ABE8.14 | 41.24 |
| ABE7.10 | 38.37 |
| Control | 0.04 |

[1109] The percent of A to G base editing at the target site achieved by several different ABE8 (or ABE7.10) adenosine base editors as described herein and sgRNA “Guide 41” compared with controls is shown in Table 22 below.

TABLE 22

| | “Guide 41”-Average (Total) % |
|---|---|
| PV34 | 46.11 |
| PV36 | 36.50 |
| PV57 | 41.33 |
| PV60 | 46.35 |
| PV65 | 47.71 |

### Cell Culture and Transfection

[1110] The HEK293T (293T) cell line was obtained from the American Tissue Culture Collection (ATCC). 293T cells were maintained in DMEM supplemented with 10% fetal bovine serum and 1% penicillin/streptomycin at 37° C. with 5% CO₂. All cell lines were transfected in 24-well plates with Lipofectamine 2000 (Invitrogen), following the manufacturer's instructions. The amount of DNA used for lipofection was 1 μg per well. Transfection efficiency was routinely higher than 80% for 293T cells as determined by fluorescent microscopy following delivery of a control GFP expression plasmid.

[1111] For plasmid transfections, HEK293T cells were plated and transfected with 250 ng of expression plasmid containing a U6 promoter and encoding the gRNA. and with 750 ng of expression plasmid encoding the Cas9/ABE8 variant base editor using Opti-MEM media and Lipofectamine 2000. The ABE8 base editor variants used included the NGG PAM sequence. The cells were maintained 37° C. with 5% CO₂ for 5 days, with a change of medicum at day 3 post transfection. Thereafter, the cells were lysed; genomic DNA was isolated and PCR was performed using standard procedures, typically using 20-100 ng of template DNA. After the addition of adapters (Illumina), the DNA was subjected to deep sequencing. Base editing at the desired site was analyzed by MiSeq analysis.

[1112] Deep sequencing was performed on PCR amplicons from genomic DNA or RNA harvested from duplicate transfections of 293T cells. After validating the quality of PCR product by gel electrophoresis, the PCR products were isolated by gel extraction, e.g., using the Zymoclean Gel DNA Recovery Kit (Zymo Research). Shotgun libraries were prepared without shearing. The library was quantified by qPCR and sequenced on one MiSeq Nano flowcell for 251 cycles from each end of the fragments using a MiSeq 500-cycle sequencing kit version 2. Fastq files were generated and demultiplexed with the bcl2fastq v2.17.1.14 Conversion Software (Illumina).

### Example 9: Splice Acceptor Disruption Using Adenosine and Cytidine Base Editors for Disrupting or Silencing SOD1 Gene Expression in Cells

[1113] In this Example, an spCas9 nickase-derived adenosine base editor (ABE) system was used to introduce a precise A-to-G mutation in the highly conserved splice acceptor “AG” nucleic acid sequence at the 5′ end of exon 3 of the SOD1 gene. In addition, cytidine base editor (CBE) system was used to introduce a precise C-to-T mutation near the splice acceptor nucleic acid sequence at the 5′ end of exon 3 of the SOD1 gene. The A-to-G base change in the “AG” nucleic acid sequence of the canonical splice acceptor site and/or the C-to-T base chance near the splice acceptor site can induce messenger RNA (mRNA) missplicing and gene transcription disruption and/or alternative splicing of exon 3 of the SOD1 gene.

[1114] ABEs were used to disrupt the canonical “AG” splice acceptor by efficiently targeting the “A” nucleobase in the AG splice acceptor in the SOD1 genomic nucleic acid sequence and converting A>G at the targeted site. The guide RNA (gRNA) was used to target adenosine (“A”) of the “AG” splice acceptor nucleic acid in conjunction with ABE8 base editor variants, namely, ABE8.1-ABE8.14, and ABE7.10, and PV variants, namely, PV1-PV14, PV PV34, PV36, PV57, PV60, PV65, PV188-PV198, and PV216 (FIGS. 58, 59, 60A, 61, 64A, 65, and 67). In addition, CBEs were used to disrupt splicing of exon 3 by efficiently targeting the “C” nucleobase located downstream of the “AG” splice acceptor site in the 5′ of exon 3 of the SOD1 genomic nucleic acid sequence and converting C>T at the targeted site. The guide RNA (gRNA) was used to target cytidine (“C”) downstream of the “AG” splice acceptor nucleic acid in conjunction with CBE base editor variants (e.g., BE4; FIGS. 63, 66A, 69, 70, and 71). Base editing was tested in the HEK293T cell line.

[1115] The gRNA encompassed the scaffold sequence and the spacer sequence (target sequence) for the splice acceptor nucleic acid sequence (“AG”) of the human SOD1 gene associated with ALS, (namely, the splice acceptor 5′ of exon 3 of SOD1) as provided herein, or as determined based on the knowledge of the skilled practitioner and as would be understood to the skilled practitioner in the art. (See, e.g., Komor, A. C., et al., “Programmable editing of a target base in genomic DNA without double-stranded DNA cleavage” Nature 533, 420-424 (2016); Gaudelli, N. M., et al., “Programmable base editing of A⋅T to G⋅C in genomic DNA without DNA cleavage” Nature 551, 464-471 (2017); Komor, A. C., et al., “Improved base excision repair inhibition and bacteriophage Mu Gam protein yields C:G-to-T:A base editors with higher efficiency and product purity” Science Advances 3:eaao4774 (2017), and Rees, H. A., et al., “Base editing: precision chemistry on the genome and transcriptome of living cells.” Nat Rev Genet. 2018 December; 19(12):770-788. doi: 10.1038/s41576-018-0059-1).

[1116] The ABE base editors used included ABE8 variants: ABE8.1, ABE8.2, ABE8.2, ABE8.3, ABE8.4, ABE8.5, ABE8.6, ABE8.7, ABE8.8, ABE8.9, ABE8.10, ABE8.11, ABE8.12, ABE8.13 and ABE8.14 (see Table 7). Positive control base editor ABE7.10 and a negative control were also used for reference comparisons. The ABE base editors used also included PV variants: PV1, PV2, PV3, PV4, PV5, PV6, PV7, PV8, PV9, PV10, PV11, PV12, PV13, PV14, PV34, PV36, PV57, PV60, PV65, PV188, PV189, PV190, PV191, PV192, PV193, PV194, PV195, PV196, PV197, PV198, and PV216. The CBE base editors used included PV217-233, PV266-268, PV271, and PV284-BE4 VRQR. A negative control was used for reference comparisons.

[1117] FIGS. 60B, 64B, 66B, 68, and 72-79 show A-to-G or C-to-T base editing efficiency of ABE and CBE base editors tested with different gRNAs as detected by deep sequencing PCR products.

[1118] The SOD1 protein level was measured to confirm that the base editing led to disruption of SOD1 mRNA splicing and protein level (FIG. 62). Base editing was tested in the HEK293T cell line with ABE8.8 or ABE7.10 base editor and guide 20 (gRNA 20) using the Lipofectamine 2000 system. The protein level was measured using the Jess Protein Simple (Western Blot). Samples were normalized to the loading control Beta Actin.

Single Guide RNAs (sgRNAs) for Base Editing SOD1 Gene Splice Acceptor

[1119] Examples of single guide RNA (sgRNA) nucleic acid sequences for SOD1 splice acceptor disruption suitable for use in the systems and methods described herein are set forth in Example 8. These sgRNAs begin at “U6” (“T” nucleobases are presented instead of “U” nucleobases in the nucleic acid sequences shown), which is complementary to the target adenosine (A) sequence of the splice acceptor “AG” sequence of the SOD1 genomic nucleic acid sequence shown in FIG. 55. The target “A” nucleobase of the SOD1 exon 3 splice acceptor “AG” sequence at position 6 of the sequence shown in FIG. 55 is indicated by the upward arrow in the figure. The below tables present results of SOD1 splice acceptor base editing using several of the sgRNAs described in Example 8. In Table 23, gRNA nucleic acid sequences and PAM sequences are described.

TABLE 23

| Guide | | | | | Editor to |
|---|---|---|---|---|---|
| Number | Gene | Guide | PAM | Guide with PAM | be used |
| 16 | SOD1 | CCUUGCCUUCUGCUCGAAAU | NGA | CCUUGCCUUCUGCUCGAAAUUGA | CBE |
| 17 | SOD1 | GUGCAGGGCAUCAUCAAUUU | NGA | GUGCAGGGCAUCAUCAAUUUCGA | CBE |
| 18 | SOD1 | UUAAAGGAAAGUAAUGGACC | NGU | UUAAAGGAAAGUAAUGGACCAGU | ABE |
| 19 | SOD1 | UUACUUUCCUUUAAGAAAAG | NGC | UUACUUUCCUUUAAGAAAAGUGC | CBE |
| 20 | SOD1 | UAAAUAGGCUGUACCAGUGC | NGG | UAAAUAGGCUGUACCAGUGCAGG | ABE |
| 21 | SOD1 | GGUACAGCCUAUUUAUAAGA | NGA | GGUACAGCCUAUUUAUAAGAAGA | CBE |
| 22 | SOD1 | AUGCUUCCCCACACCUUCAC | NGG | AUGCUUCCCCACACCUUCACUGG | CBE |
| 23 | SOD1 | UCUAUCCAGAAAACACGGUG | NGC | UCUAUCCAGAAAACACGGUGGGC | ABE |
| 24 | SOD1 | UUCAUUAUUAGGCAUGUUGG | NGAC | UUCAUUAUUAGGCAUGUUGGAGA | ABE |
| 25 | SOD1 | AACAUGCCUAAUAAUGAAAA | NGCA | AACAUGCCUAAUAAUGAAAAAGC | CBE |

[1120] In Table 24, highest on-target base editing at the target site is presented for several gRNAs and ABE/CBEs.

TABLE 24

| Guide | | | | | Highest on |
|---|---|---|---|---|---|
| Number | Gene | Guide with PAM | Editor | | Target Editing |
| 16 | SOD1 | CCUUGCCUUCUGCUCGAAAUUGA | CBE | Hum, Rhe, Cyn | <10% |
| 17 | SOD1 | GUGCAGGGCAUCAUCAAUUUCGA | CBE | Hum | <10% |
| 18 | SOD1 | UUAAAGGAAAGUAAUGGACCAGU | ABE | Hum, Rhe, Cyn | >20% |
| 20 | SOD1 | UAAAUAGGCUGUACCAGUGCAGG | ABE | Hum, Mus, Rhe, Cyn | ~80% |
| 21 | SOD1 | GGUACAGCCUAUUUAUAAGAAGA | CBE | Hum | <10% |
| 22 | SOD1 | AUGCUUCCCCACACCUUCACUGG | CBE | Hum, Rhe, Cyn | |
| 24 | SOD1 | UUCAUUAUUAGGCAUGUUGGAGA | ABE | Hum | <5% |
| 25 | SOD1 | AACAUGCCUAAUAAUGAAAAAGC | CBE | Hum | |
| 39 | SOD1 | UUCCUUUAAGAAAAGUGCAAAGU | CBE | Hum | |
| 40 | SOD1 | ACAGCCUAUUUAUAAGAAGAAGA | CBE | Hum | >20% |
| 41 | SOD1 | AAAUAGGCUGUACCAGUGCAGGU | ABE | Hum, Rhe, Cyn | >40% |
| 42 | SOD1 | UAUUAGGCAUGUUGGAGACUUGG | ABE | Hum | >50% |

[1121] In Tables 25-34, the percent of A to G or C to T base editing at the target site and near the target site (e.g., bystanders) achieved by several different ARE8 (or ABE7.10) adenosine base editors, PV adenosine base editors, or CBEs such as BE4, as described herein and different sgRNAs compared with controls is shown.

TABLE 25
ALS guide 15

| Sample | seq_name | target_site_seq | Guide | C2T | C3T | C5T | C6T | C7T | C8T |
|---|---|---|---|---|---|---|---|---|---|
| S002-PV284- | PCR_BTx251 | TCCACCCCAGAAGACCTGCCTGA | UCCACCCCAGAAGACCUGCCUGA | 4.41 | 4.13 | 7.25 | 7.39 | 7.91 | 7.93 |
| G15-ACM- | | | | | | | | | |
| 3321 | | | | | | | | | |
| S014-PV284- | PCR_BTx251 | TCCACCCCAGAAGACCTGCCTGA | UCCACCCCAGAAGACCUGCCUGA | 4.86 | 4.04 | 8.22 | 8.94 | 8.86 | 8.65 |
| G15-ACM- | | | | | | | | | |
| 3321 | | | | | | | | | |
| S026-PV284- | PCR_BTx251 | TCCACCCCAGAAGACCTGCCTGA | UCCACCCCAGAAGACCUGCCUGA | 3.31 | 2.44 | 8.05 | 8.29 | 8.21 | 8.57 |
| G15-ACM- | | | | | | | | | |
| 3321 | | | | | | | | | |
| S038-Water- | PCR_BTx251 | TCCACCCCAGAAGACCTGCCTGA | UCCACCCCAGAAGACCUGCCUGA | 0.01 | 0.02 | 0.01 | 0.01 | 0.03 | 0.01 |
| G15-ACM- | | | | | | | | | |
| 3322 | | | | | | | | | |
| S050-Water- | PCR_BTx251 | TCCACCCCAGAAGACCTGCCTGA | UCCACCCCAGAAGACCUGCCUGA | 0.02 | 0.02 | 0.01 | 0.01 | 0.01 | 0.01 |
| G15-ACM- | | | | | | | | | |
| 3322 | | | | | | | | | |

TABLE 26
ALS guide 16

| Sample | seq_name | target_site_seq | Guide | C6T | C7T | T8G | T9G | C10T | C15A | C15T |
|---|---|---|---|---|---|---|---|---|---|---|
| S004-PV284-G16- | PCR_BTx252 | CCTTGCCTTCTGCT | CCUUGCCUUCUGCU | 5.97 | 7.81 | 2.93 | 1.83 | 8.22 | 0.72 | 5.26 |
| ACM-3323 | | CGAAATTGA | CGAAAUUGA | | | | | | | |
| S016-PV284-G16- | PCR_BTx252 | CCTTGCCTTCTGCT | CCUUGCCUUCUGCU | 5.84 | 8.7 | 2.67 | 2.05 | 8.75 | 0.52 | 4.65 |
| ACM-3323 | | CGAAATTGA | CGAAAUUGA | | | | | | | |
| S064-Control-G16- | PCR_BTx252 | CCTTGCCTTCTGCT | CCUUGCCUUCUGCU | 0 | 0 | 2.71 | 1.65 | 0.01 | 0.63 | 0.01 |
| G17-ACM-3324- | | CGAAATTGA | CGAAAUUGA | | | | | | | |
| CCTTGCCTTCTGCT | | | | | | | | | | |
| CGAAATTGA | | | | | | | | | | |
| S076-Control-G16- | PCR_BTx252 | CCTTGCCTTCTGCT | CCUUGCCUUCUGCU | 0 | 0 | 2.54 | 1.49 | 0 | 0.52 | 0.02 |
| G17-ACM-3324- | | CGAAATTGA | CGAAAUUGA | | | | | | | |
| CCTTGCCTTCTGCT | | | | | | | | | | |
| CGAAATTGA | | | | | | | | | | |
| S087-PV284-G16- | PCR_BTx252 | CCTTGCCTTCTGCT | CCUUGCCUUCUGCU | 7.15 | 8.56 | 2.54 | 2.41 | 8.42 | 0.62 | 4.83 |
| ACM-3323 | | CGAAATTGA | CGAAAUUGA | | | | | | | |

TABLE 27
ALS guide 17

| sample | seq_name | target_site_seq | Guide | C4T | G6T | C12T | C15T | G22T |
|---|---|---|---|---|---|---|---|---|
| S028-PV284-G17-ACM- | PCR_BTx252 | GTGCAGGGCATCATC | GUGCAGGGCAUCAUC | 5.98 | 0.84 | 13.41 | 2.14 | 0.62 |
| 3325 | | AATTTCGA | AAUUUCGA | | | | | |
| S040-PV284-G17-ACM- | PCR_BTx252 | GTGCAGGGCATCATC | GUGCAGGGCAUCAUC | 5.25 | 0.75 | 11.82 | 2.16 | 0.61 |
| 3325 | | AATTTCGA | AAUUUCGA | | | | | |
| S052-PV284-G17-ACM- | PCR_BTx252 | GTGCAGGGCATCATC | GUGCAGGGCAUCAUC | 4.38 | 0.85 | 12.75 | 2.87 | 0.82 |
| 3325 | | AATTTCGA | AAUUUCGA | | | | | |
| S064-Control-G16-G17- | PCR_BTx252 | GTGCAGGGCATCATC | GUGCAGGGCAUCAUC | 0 | 0.87 | 0 | 0 | 0.63 |
| ACM-3324- | | AATTTCGA | AAUUUCGA | | | | | |
| GTGCAGGGCATCATCA | | | | | | | | |
| ATTTCGA | | | | | | | | |
| S076-Control-G16-G17- | PCR_BTx252 | GTGCAGGGCATCATC | GUGCAGGGCAUCAUC | 0 | 0.65 | 0 | 0 | 0.52 |
| ACM-3324- | | AATTTCGA | AAUUUCGA | | | | | |
| GTGCAGGGCATCATCA | | | | | | | | |
| ATTTCGA | | | | | | | | |

TABLE 28A
ALS guide 18

| sample | seq_name | target_site_seq | Guide | T12C | A18C | A18T | A21G | T23G |
|---|---|---|---|---|---|---|---|---|
| S145-ACM- | PCR_BTx082 | TTAAAGGAAAGTA | UUAAAGGAAAGUA | 0.05 | 1.67 | 0.75 | 0.03 | 0.1 |
| G18-PV34- | | ATGGACCAGT | AUGGACCAGU | | | | | |
| ACM- | | | | | | | | |
| Plate2-A7- | | | | | | | | |
| PCR- | | | | | | | | |
| BTx082 | | | | | | | | |
| S146-ACM- | PCR_BTx082 | TTAAAGGAAAGTA | UUAAAGGAAAGUA | 0.11 | 1.75 | 0.74 | 0.05 | 0.08 |
| G18-PV36- | | ATGGACCAGT | AUGGACCAGU | | | | | |
| ACM- | | | | | | | | |
| Plate2-B7- | | | | | | | | |
| PCR- | | | | | | | | |
| BTx082 | | | | | | | | |
| S147-ACM- | PCR_BTx082 | TTAAAGGAAAGTA | UUAAAGGAAAGUA | 0.12 | 1.68 | 0.76 | 0.03 | 0.1 |
| G18-PV57- | | ATGGACCAGT | AUGGACCAGU | | | | | |
| ACM- | | | | | | | | |
| Plate2-C7- | | | | | | | | |
| PCR- | | | | | | | | |
| BTx082 | | | | | | | | |
| S148-ACM- | PCR_BTx082 | TTAAAGGAAAGTA | UUAAAGGAAAGUA | 0.06 | 1.74 | 0.71 | 0.03 | 0.08 |
| G18-PV60- | | ATGGACCAGT | AUGGACCAGU | | | | | |
| ACM- | | | | | | | | |
| Plate2-D7- | | | | | | | | |
| PCR- | | | | | | | | |
| BTx082 | | | | | | | | |
| S149-ACM- | PCR_BTx082 | TTAAAGGAAAGTA | UUAAAGGAAAGUA | 7.14 | 0 | 0 | 0 | 0 |
| G18-PV65- | | ATGGACCAGT | AUGGACCAGU | | | | | |
| ACM- | | | | | | | | |
| Plate2-E7- | | | | | | | | |
| PCR- | | | | | | | | |
| BTx082 | | | | | | | | |
| S150-ACM- | PCR_BTx082 | TTAAAGGAAAGTA | UUAAAGGAAAGUA | 0.06 | 1.65 | 0.75 | 0.02 | 0.11 |
| G18- | | ATGGACCAGT | AUGGACCAGU | | | | | |
| PV188- | | | | | | | | |
| ACM- | | | | | | | | |
| Plate2-F7- | | | | | | | | |
| PCR- | | | | | | | | |
| BTx082 | | | | | | | | |
| S151-ACM- | PCR_BTx082 | TTAAAGGAAAGTA | UUAAAGGAAAGUA | 0.25 | 1.76 | 0.71 | 0.03 | 0.08 |
| G18- | | ATGGACCAGT | AUGGACCAGU | | | | | |
| PV189- | | | | | | | | |
| ACM- | | | | | | | | |
| Plate2-G7- | | | | | | | | |
| PCR- | | | | | | | | |
| BTx082 | | | | | | | | |
| S152-ACM- | PCR_BTx082 | TTAAAGGAAAGTA | UUAAAGGAAAGUA | 0.07 | 1.7 | 0.7 | 0.04 | 0.14 |
| G18- | | ATGGACCAGT | AUGGACCAGU | | | | | |
| PV190- | | | | | | | | |
| ACM- | | | | | | | | |
| Plate2-H7- | | | | | | | | |
| PCR- | | | | | | | | |
| BTx082 | | | | | | | | |
| S153-ACM- | PCR_BTx082 | TTAAAGGAAAGTA | UUAAAGGAAAGUA | 0.03 | 1.7 | 0.81 | 0.03 | 0.12 |
| G18-PV34- | | ATGGACCAGT | AUGGACCAGU | | | | | |
| ACM- | | | | | | | | |
| Plate2-A8- | | | | | | | | |
| PCR- | | | | | | | | |
| BTx082 | | | | | | | | |
| S154-ACM- | PCR_BTx082 | TTAAAGGAAAGTA | UUAAAGGAAAGUA | 0.04 | 1.92 | 0.77 | 0.02 | 0.06 |
| G18-PV36- | | ATGGACCAGT | AUGGACCAGU | | | | | |
| ACM- | | | | | | | | |
| Plate2-B8- | | | | | | | | |
| PCR- | | | | | | | | |
| BTx082 | | | | | | | | |
| S155-ACM- | PCR_BTx082 | TTAAAGGAAAGTA | UUAAAGGAAAGUA | 0 | 2 | 0.77 | 0 | 0.05 |
| G18-PV57- | | ATGGACCAGT | AUGGACCAGU | | | | | |
| ACM- | | | | | | | | |
| Plate2-C8- | | | | | | | | |
| PCR- | | | | | | | | |
| BTx082 | | | | | | | | |
| S156-ACM- | PCR_BTx082 | TTAAAGGAAAGTA | UUAAAGGAAAGUA | 0.05 | 1.71 | 0.74 | 0.03 | 0.09 |
| G18-PV60- | | ATGGACCAGT | AUGGACCAGU | | | | | |
| ACM- | | | | | | | | |
| Plate2-D8- | | | | | | | | |
| PCR- | | | | | | | | |
| BTx082 | | | | | | | | |
| S157-ACM- | PCR_BTx082 | TTAAAGGAAAGTA | UUAAAGGAAAGUA | 0.11 | 1.74 | 0.78 | 0.02 | 0.11 |
| G18-PV65- | | ATGGACCAGT | AUGGACCAGU | | | | | |
| ACM- | | | | | | | | |
| Plate2-E8- | | | | | | | | |
| PCR- | | | | | | | | |
| BTx082 | | | | | | | | |
| S158-ACM- | PCR_BTx082 | TTAAAGGAAAGTA | UUAAAGGAAAGUA | 0.03 | 1.7 | 0.73 | 0.04 | 0.1 |
| G18- | | ATGGACCAGT | AUGGACCAGU | | | | | |
| PV188- | | | | | | | | |
| ACM- | | | | | | | | |
| Plate2-F8- | | | | | | | | |
| PCR- | | | | | | | | |
| BTx082 | | | | | | | | |
| S159-ACM- | PCR_BTx082 | TTAAAGGAAAGTA | UUAAAGGAAAGUA | 0.13 | 1.7 | 0.76 | 0.04 | 0.12 |
| G18- | | ATGGACCAGT | AUGGACCAGU | | | | | |
| PV189- | | | | | | | | |
| ACM- | | | | | | | | |
| Plate2-G8- | | | | | | | | |
| PCR- | | | | | | | | |
| BTx082 | | | | | | | | |
| S160-ACM- | PCR_BTx082 | TTAAAGGAAAGTA | UUAAAGGAAAGUA | 0.05 | 1.79 | 0.77 | 0.04 | 0.11 |
| G18- | | ATGGACCAGT | AUGGACCAGU | | | | | |
| PV190- | | | | | | | | |
| ACM- | | | | | | | | |
| Plate2-H8- | | | | | | | | |
| PCR- | | | | | | | | |
| BTx082 | | | | | | | | |
| S161-ACM- | PCR_BTx082 | TTAAAGGAAAGTA | UUAAAGGAAAGUA | 0.07 | 1.7 | 0.69 | 0.04 | 0.13 |
| G18-PV34- | | ATGGACCAGT | AUGGACCAGU | | | | | |
| ACM- | | | | | | | | |
| Plate2-A9- | | | | | | | | |
| PCR- | | | | | | | | |
| BTx082 | | | | | | | | |
| S162-ACM- | PCR_BTx082 | TTAAAGGAAAGTA | UUAAAGGAAAGUA | 0.08 | 1.79 | 0.77 | 0.04 | 0.12 |
| G18-PV36- | | ATGGACCAGT | AUGGACCAGU | | | | | |
| ACM- | | | | | | | | |
| Plate2-B9- | | | | | | | | |
| PCR- | | | | | | | | |
| BTx082 | | | | | | | | |
| S163-ACM- | PCR_BTx082 | TTAAAGGAAAGTA | UUAAAGGAAAGUA | 0.05 | 1.76 | 0.79 | 0.04 | 0.11 |
| G18-PV57- | | ATGGACCAGT | AUGGACCAGU | | | | | |
| ACM- | | | | | | | | |
| Plate2-C9- | | | | | | | | |
| PCR- | | | | | | | | |
| BTx082 | | | | | | | | |
| S164-ACM- | PCR_BTx082 | TTAAAGGAAAGTA | UUAAAGGAAAGUA | 0.07 | 1.78 | 0.68 | 0.03 | 0.1 |
| G18-PV60- | | ATGGACCAGT | AUGGACCAGU | | | | | |
| ACM- | | | | | | | | |
| Plate2-D9- | | | | | | | | |
| PCR- | | | | | | | | |
| BTx082 | | | | | | | | |
| S165-ACM- | PCR_BTx082 | TTAAAGGAAAGTA | UUAAAGGAAAGUA | 0.09 | 1.7 | 0.71 | 0.05 | 0.12 |
| G18-PV65- | | ATGGACCAGT | AUGGACCAGU | | | | | |
| ACM- | | | | | | | | |
| Plate2-E9- | | | | | | | | |
| PCR- | | | | | | | | |
| BTx082 | | | | | | | | |
| S166-ACM- | PCR_BTx082 | TTAAAGGAAAGTA | UUAAAGGAAAGUA | 0.06 | 1.82 | 0.81 | 0.02 | 0.1 |
| G18- | | ATGGACCAGT | AUGGACCAGU | | | | | |
| PV188- | | | | | | | | |
| ACM- | | | | | | | | |
| Plate2-F9- | | | | | | | | |
| PCR- | | | | | | | | |
| BTx082 | | | | | | | | |
| S167-ACM- | PCR_BTx082 | TTAAAGGAAAGTA | UUAAAGGAAAGUA | 0.13 | 1.66 | 0.74 | 0.04 | 0.11 |
| G18- | | ATGGACCAGT | AUGGACCAGU | | | | | |
| PV189- | | | | | | | | |
| ACM- | | | | | | | | |
| Plate2-G9- | | | | | | | | |
| PCR- | | | | | | | | |
| BTx082 | | | | | | | | |
| S168-ACM- | PCR_BTx082 | TTAAAGGAAAGTA | UUAAAGGAAAGUA | 0.09 | 1.7 | 0.79 | 0.02 | 0.07 |
| G18-PV190- | | ATGGACCAGT | AUGGACCAGU | | | | | |
| ACM- | | | | | | | | |
| Plate2-H9- | | | | | | | | |
| PCR- | | | | | | | | |
| BTx082 | | | | | | | | |
| S169-ACM- | PCR_BTx082 | TTAAAGGAAAGTA | UUAAAGGAAAGUA | 2.72 | 1.79 | 0.72 | 0.03 | 0.1 |
| G18- | | ATGGACCAGT | AUGGACCAGU | | | | | |
| PV191- | | | | | | | | |
| ACM- | | | | | | | | |
| Plate2-A10- | | | | | | | | |
| PCR- | | | | | | | | |
| BTx082 | | | | | | | | |
| S170-ACM- | PCR_BTx082 | TTAAAGGAAAGTA | UUAAAGGAAAGUA | 0.63 | 1.83 | 0.71 | 0.02 | 0.11 |
| G18- | | ATGGACCAGT | AUGGACCAGU | | | | | |
| PV192- | | | | | | | | |
| ACM- | | | | | | | | |
| Plate2-B10- | | | | | | | | |
| PCR- | | | | | | | | |
| BTx082 | | | | | | | | |
| S171-ACM- | PCR_BTx082 | TTAAAGGAAAGTA | UUAAAGGAAAGUA | 0.93 | 1.71 | 0.71 | 0.03 | 0.12 |
| G18- | | ATGGACCAGT | AUGGACCAGU | | | | | |
| PV193- | | | | | | | | |
| ACM- | | | | | | | | |
| Plate2-C10- | | | | | | | | |
| PCR- | | | | | | | | |
| BTx082 | | | | | | | | |
| S172-ACM- | PCR_BTx082 | TTAAAGGAAAGTA | UUAAAGGAAAGUA | 0.32 | 1.8 | 0.71 | 0.02 | 0.06 |
| G18- | | ATGGACCAGT | AUGGACCAGU | | | | | |
| PV194- | | | | | | | | |
| ACM- | | | | | | | | |
| Plate2-D10- | | | | | | | | |
| PCR- | | | | | | | | |
| BTx082 | | | | | | | | |
| S173-ACM- | PCR_BTx082 | TTAAAGGAAAGTA | UUAAAGGAAAGUA | 2.04 | 1.8 | 0.74 | 0.03 | 0.09 |
| G18- | | ATGGACCAGT | AUGGACCAGU | | | | | |
| PV195- | | | | | | | | |
| ACM- | | | | | | | | |
| Plate2-E10- | | | | | | | | |
| PCR- | | | | | | | | |
| BTx082 | | | | | | | | |
| S174-ACM- | PCR_BTx082 | TTAAAGGAAAGTA | UUAAAGGAAAGUA | 1.27 | 1.75 | 0.68 | 0.03 | 0.08 |
| G18- | | ATGGACCAGT | AUGGACCAGU | | | | | |
| PV196- | | | | | | | | |
| ACM- | | | | | | | | |
| Plate2-F10- | | | | | | | | |
| PCR- | | | | | | | | |
| BTx082 | | | | | | | | |
| S175-ACM- | PCR_BTx082 | TTAAAGGAAAGTA | UUAAAGGAAAGUA | 0.01 | 1.61 | 0.78 | 0.04 | 0.09 |
| G18- | | ATGGACCAGT | AUGGACCAGU | | | | | |
| PV197- | | | | | | | | |
| ACM- | | | | | | | | |
| Plate2-G10- | | | | | | | | |
| PCR- | | | | | | | | |
| BTx082 | | | | | | | | |
| S176-ACM- | PCR_BTx082 | TTAAAGGAAAGTA | UUAAAGGAAAGUA | 0 | 1.66 | 0.76 | 0.02 | 0.1 |
| G18- | | ATGGACCAGT | AUGGACCAGU | | | | | |
| PV198- | | | | | | | | |
| ACM- | | | | | | | | |
| Plate2-H10- | | | | | | | | |
| PCR- | | | | | | | | |
| BTx082 | | | | | | | | |
| S177-ACM- | PCR_BTx082 | TTAAAGGAAAGTA | UUAAAGGAAAGUA | 2.21 | 1.66 | 0.81 | 0.01 | 0.13 |
| G18- | | ATGGACCAGT | AUGGACCAGU | | | | | |
| PV191- | | | | | | | | |
| ACM- | | | | | | | | |
| Plate2-A11- | | | | | | | | |
| PCR- | | | | | | | | |
| BTx082 | | | | | | | | |
| S178-ACM- | PCR_BTx082 | TTAAAGGAAAGTA | UUAAAGGAAAGUA | 0.63 | 1.68 | 0.76 | 0.04 | 0.11 |
| G18- | | ATGGACCAGT | AUGGACCAGU | | | | | |
| PV192- | | | | | | | | |
| ACM- | | | | | | | | |
| Plate2-B11- | | | | | | | | |
| PCR- | | | | | | | | |
| BTx082 | | | | | | | | |
| S179-ACM- | PCR_BTx082 | TTAAAGGAAAGTA | UUAAAGGAAAGUA | 0.71 | 1.94 | 0.86 | 0.04 | 0.06 |
| G18- | | ATGGACCAGT | AUGGACCAGU | | | | | |
| PV193- | | | | | | | | |
| ACM- | | | | | | | | |
| Plate2-C11- | | | | | | | | |
| PCR- | | | | | | | | |
| BTx082 | | | | | | | | |
| S180-ACM- | PCR_BTx082 | TTAAAGGAAAGTA | UUAAAGGAAAGUA | 0.34 | 1.76 | 0.79 | 0.03 | 0.12 |
| G18- | | ATGGACCAGT | AUGGACCAGU | | | | | |
| PV194- | | | | | | | | |
| ACM- | | | | | | | | |
| Plate2-D11- | | | | | | | | |
| PCR- | | | | | | | | |
| BTx082 | | | | | | | | |
| S181-ACM- | PCR_BTx082 | TTAAAGGAAAGTA | UUAAAGGAAAGUA | 2.22 | 1.9 | 0.8 | 0.02 | 0.09 |
| G18- | | ATGGACCAGT | AUGGACCAGU | | | | | |
| PV195- | | | | | | | | |
| ACM- | | | | | | | | |
| Plate2-E11- | | | | | | | | |
| PCR- | | | | | | | | |
| BTx082 | | | | | | | | |
| S182-ACM- | PCR_BTx082 | TTAAAGGAAAGTA | UUAAAGGAAAGUA | 1.5 | 1.81 | 0.69 | 0.04 | 0.09 |
| G18- | | ATGGACCAGT | AUGGACCAGU | | | | | |
| PV196- | | | | | | | | |
| ACM- | | | | | | | | |
| Plate2-F11- | | | | | | | | |
| PCR- | | | | | | | | |
| BTx082 | | | | | | | | |
| S183-ACM- | PCR_BTx082 | TTAAAGGAAAGTA | UUAAAGGAAAGUA | 0 | 5.56 | 0 | 5.26 | 4.76 |
| G18- | | ATGGACCAGT | AUGGACCAGU | | | | | |
| PV197- | | | | | | | | |
| ACM- | | | | | | | | |
| Plate2-G11- | | | | | | | | |
| PCR- | | | | | | | | |
| BTx082 | | | | | | | | |
| S184-ACM- | PCR_BTx082 | TTAAAGGAAAGTA | UUAAAGGAAAGUA | 0.01 | 1.63 | 0.8 | 0.06 | 0.09 |
| G18- | | ATGGACCAGT | AUGGACCAGU | | | | | |
| PV198- | | | | | | | | |
| ACM- | | | | | | | | |
| Plate2-H11- | | | | | | | | |
| PCR- | | | | | | | | |
| BTx082 | | | | | | | | |
| S185-ACM- | PCR_BTx082 | TTAAAGGAAAGTA | UUAAAGGAAAGUA | 1.84 | 1.82 | 0.73 | 0.02 | 0.11 |
| G18- | | ATGGACCAGT | AUGGACCAGU | | | | | |
| PV191- | | | | | | | | |
| ACM- | | | | | | | | |
| Plate2-Al2- | | | | | | | | |
| PCR- | | | | | | | | |
| BTx082 | | | | | | | | |
| S186-ACM- | PCR_BTx082 | TTAAAGGAAAGTA | UUAAAGGAAAGUA | 0.6 | 1.65 | 0.73 | 0.04 | 0.14 |
| G18- | | ATGGACCAGT | AUGGACCAGU | | | | | |
| PV192- | | | | | | | | |
| ACM- | | | | | | | | |
| Plate2-B12- | | | | | | | | |
| PCR- | | | | | | | | |
| BTx082 | | | | | | | | |
| S187-ACM- | PCR_BTx082 | TTAAAGGAAAGTA | UUAAAGGAAAGUA | 0.8 | 1.79 | 0.75 | 0.05 | 0.09 |
| G18- | | ATGGACCAGT | AUGGACCAGU | | | | | |
| PV193- | | | | | | | | |
| ACM- | | | | | | | | |
| Plate2-C12- | | | | | | | | |
| PCR- | | | | | | | | |
| BTx082 | | | | | | | | |
| S188-ACM- | PCR_BTx082 | TTAAAGGAAAGTA | UUAAAGGAAAGUA | 0.36 | 1.82 | 0.65 | 0.04 | 0.11 |
| G18- | | ATGGACCAGT | AUGGACCAGU | | | | | |
| PV194- | | | | | | | | |
| ACM- | | | | | | | | |
| Plate2-D12- | | | | | | | | |
| PCR- | | | | | | | | |
| BTx082 | | | | | | | | |
| S189-ACM- | PCR_BTx082 | TTAAAGGAAAGTA | UUAAAGGAAAGUA | 2.82 | 1.81 | 0.72 | 0.02 | 0.07 |
| G18- | | ATGGACCAGT | AUGGACCAGU | | | | | |
| PV195- | | | | | | | | |
| ACM- | | | | | | | | |
| Plate2-E12- | | | | | | | | |
| PCR- | | | | | | | | |
| BTx082 | | | | | | | | |
| S190-ACM- | PCR_BTx082 | TTAAAGGAAAGTA | UUAAAGGAAAGUA | 1.4 | 1.83 | 0.77 | 0.03 | 0.08 |
| G18- | | ATGGACCAGT | AUGGACCAGU | | | | | |
| PV196- | | | | | | | | |
| ACM- | | | | | | | | |
| Plate2-F12- | | | | | | | | |
| PCR- | | | | | | | | |
| BTx082 | | | | | | | | |
| S191-ACM- | PCR_BTx082 | TTAAAGGAAAGTA | UUAAAGGAAAGUA | 0.02 | 1.85 | 0.8 | 0.03 | 0.1 |
| G18- | | ATGGACCAGT | AUGGACCAGU | | | | | |
| PV197- | | | | | | | | |
| ACM- | | | | | | | | |
| Plate2-G12- | | | | | | | | |
| PCR- | | | | | | | | |
| BTx082 | | | | | | | | |
| S192-ACM- | PCR_BTx082 | TTAAAGGAAAGTA | UUAAAGGAAAGUA | 0.02 | 1.62 | 0.84 | 0.05 | 0.1 |
| G18- | | ATGGACCAGT | AUGGACCAGU | | | | | |
| PV198- | | | | | | | | |
| ACM- | | | | | | | | |
| Plate2-H12- | | | | | | | | |
| PCR- | | | | | | | | |
| BTx082 | | | | | | | | |

TABLE 28B
ALS guide 18

| sample | seq_name | target_site_seq | Guide | A3G | A4G | A5G | A8G | A8T | A9G | A10G | G11T | T12G | A13G | T15G | G17T |
|---|---|---|---|---|---|---|---|---|---|---|---|---|---|---|---|
| S005- | PCR_BTx082 | TTAAAGGAA | UUAAAGGAA | 2.94 | 0 | 8.82 | 6.06 | 0 | 0 | 0 | 0 | 3.03 | 0 | 0 | 0 |
| PV36- | | AGTAATGGA | AGUAAUGGA | | | | | | | | | | | | |
| G18- | | CCAGT | CCAGU | | | | | | | | | | | | |
| ACM- | | | | | | | | | | | | | | | |
| 3337 | | | | | | | | | | | | | | | |
| S006- | PCR_BTx082 | TTAAAGGAA | UUAAAGGAA | 7.9 | 4.91 | 15.85 | 19.57 | 0 | 1.53 | 3.04 | 2.43 | 0 | 1.82 | 0 | 0 |
| PV60- | | AGTAATGGA | AGUAAUGGA | | | | | | | | | | | | |
| G18- | | CCAGT | CCAGU | | | | | | | | | | | | |
| ACM- | | | | | | | | | | | | | | | |
| 3339 | | | | | | | | | | | | | | | |
| S007- | PCR_BTx082 | TTAAAGGAA | UUAAAGGAA | 0.05 | 0.05 | 0.05 | 0.1 | 0 | 0.05 | 0 | 2.23 | 0 | 0.05 | 0.05 | 0 |
| Water- | | AGTAATGGA | AGUAAUGGA | | | | | | | | | | | | |
| G18- | | CCAGT | CCAGU | | | | | | | | | | | | |
| ACM- | | | | | | | | | | | | | | | |
| 3341 | | | | | | | | | | | | | | | |
| S017- | PCR_BTx082 | TTAAAGGAA | UUAAAGGAA | 6.38 | 2.05 | 12.53 | 15.6 | 0 | 1.79 | 3.33 | 1.76 | 0 | 0.38 | 0 | 0 |
| PV57- | | AGTAATGGA | AGUAAUGGA | | | | | | | | | | | | |
| G18- | | CCAGT | CCAGU | | | | | | | | | | | | |
| ACM- | | | | | | | | | | | | | | | |
| 3338 | | | | | | | | | | | | | | | |
| S018- | PCR_BTx082 | TTAAAGGAA | UUAAAGGAA | 7.59 | 2.4 | 13.96 | 18.02 | 0.09 | 1.88 | 2.14 | 2.19 | 0 | 1.54 | 0 | 0 |
| PV65- | | AGTAATGGA | AGUAAUGGA | | | | | | | | | | | | |
| G18- | | CCAGT | CCAGU | | | | | | | | | | | | |
| ACM- | | | | | | | | | | | | | | | |
| 3340 | | | | | | | | | | | | | | | |
| S029- | PCR_BTx082 | TTAAAGGAA | UUAAAGGAA | 6.52 | 7.45 | 18.58 | 24.77 | 0 | 1.55 | 5.9 | 0.87 | 0 | 1.24 | 0 | 0 |
| PV60- | | AGTAATGGA | AGUAAUGGA | | | | | | | | | | | | |
| G18- | | CCAGT | CCAGU | | | | | | | | | | | | |
| ACM- | | | | | | | | | | | | | | | |
| 3339 | | | | | | | | | | | | | | | |
| S030- | PCR_BTx082 | TTAAAGGAA | UUAAAGGAA | 0 | 0 | 0 | 0 | 0 | 0 | 0 | 1.72 | 0.04 | 0 | 0 | 0 |
| Water- | | AGTAATGGA | AGUAAUGGA | | | | | | | | | | | | |
| G18- | | CCAGT | CCAGU | | | | | | | | | | | | |
| ACM- | | | | | | | | | | | | | | | |
| 3341 | | | | | | | | | | | | | | | |
| S041- | PCR_BTx082 | TTAAAGGAA | UUAAAGGAA | 7.26 | 4.29 | 12.82 | 20.94 | 0 | 2.56 | 7.69 | 1.66 | 0 | 2.14 | 0 | 0 |
| PV65- | | AGTAATGGA | AGUAAUGGA | | | | | | | | | | | | |
| G18- | | CCAGT | CCAGU | | | | | | | | | | | | |
| ACM- | | | | | | | | | | | | | | | |
| 3340 | | | | | | | | | | | | | | | |
| S042- | PCR_BTx082 | TTAAAGGAA | UUAAAGGAA | 5.74 | 1.72 | 11.66 | 17.05 | 0 | 0 | 1.15 | 3.01 | 0 | 1.34 | 0 | 0 |
| PV34- | | AGTAATGGA | AGUAAUGGA | | | | | | | | | | | | |
| G18- | | CCAGT | CCAGU | | | | | | | | | | | | |
| ACM- | | | | | | | | | | | | | | | |
| 3336 | | | | | | | | | | | | | | | |
| S053- | PCR_BTx082 | TTAAAGGAA | UUAAAGGAA | 0 | 0 | 0.12 | 0.12 | 0 | 0 | 0 | 1.21 | 0 | 0 | 0 | 0 |
| Water- | | AGTAATGGA | AGUAAUGGA | | | | | | | | | | | | |
| G18- | | CCAGT | CCAGU | | | | | | | | | | | | |
| ACM- | | | | | | | | | | | | | | | |
| 3341 | | | | | | | | | | | | | | | |
| S054- | PCR_BTx082 | TTAAAGGAA | UUAAAGGAA | 3.67 | 2.11 | 7.96 | 8.54 | 0 | 0.64 | 1.43 | 1.74 | 0.07 | 0.81 | 0 | 0 |
| PV36- | | AGTAATGGA | AGUAAUGGA | | | | | | | | | | | | |
| G18- | | CCAGT | CCAGU | | | | | | | | | | | | |
| ACM- | | | | | | | | | | | | | | | |
| 3337 | | | | | | | | | | | | | | | |
| S065- | PCR_BTx082 | TTAAAGGAA | UUAAAGGAA | 6.3 | 3.06 | 12.45 | 15.32 | 0 | 2.26 | 1.9 | 2.14 | 0 | 1.96 | 0 | 0 |
| PV34- | | AGTAATGGA | AGUAAUGGA | | | | | | | | | | | | |
| G18- | | CCAGT | CCAGU | | | | | | | | | | | | |
| ACM- | | | | | | | | | | | | | | | |
| 3336 | | | | | | | | | | | | | | | |
| S066- | PCR_BTx082 | TTAAAGGAA | UUAAAGGAA | 9.26 | 4.67 | 17.59 | 16.67 | 0.93 | 4.63 | 3.7 | 0 | 0 | 4.59 | 0.92 | 0 |
| PV57- | | AGTAATGGA | AGUAAUGGA | | | | | | | | | | | | |
| G18- | | CCAGT | CCAGU | | | | | | | | | | | | |
| ACM- | | | | | | | | | | | | | | | |
| 3338 | | | | | | | | | | | | | | | |
| S077- | PCR_BTx082 | TTAAAGGAA | UUAAAGGAA | 4.02 | 1.18 | 6.39 | 7.59 | 0 | 0.89 | 1.6 | 1.63 | 0 | 1.07 | 0 | 0 |
| PV36- | | AGTAATGGA | AGUAAUGGA | | | | | | | | | | | | |
| G18- | | CCAGT | CCAGU | | | | | | | | | | | | |
| ACM- | | | | | | | | | | | | | | | |
| 3337 | | | | | | | | | | | | | | | |
| S078- | PCR_BTx082 | TTAAAGGAA | UUAAAGGAA | 10.76 | 5.35 | 20.19 | 25.55 | 0 | 2.22 | 3.48 | 2.07 | 0 | 1.26 | 0 | 0 |
| PV60- | | AGTAATGGA | AGUAAUGGA | | | | | | | | | | | | |
| G18- | | CCAGT | CCAGU | | | | | | | | | | | | |
| ACM- | | | | | | | | | | | | | | | |
| 3339 | | | | | | | | | | | | | | | |
| S088- | PCR_BTx082 | TTAAAGGAA | UUAAAGGAA | 6.04 | 3.85 | 15.26 | 14.46 | 0 | 1.01 | 2.62 | 1.94 | 0 | 1.01 | 0 | 0 |
| PV34- | | AGTAATGGA | AGUAAUGGA | | | | | | | | | | | | |
| G18- | | CCAGT | CCAGU | | | | | | | | | | | | |
| ACM- | | | | | | | | | | | | | | | |
| 3336 | | | | | | | | | | | | | | | |
| S089- | PCR_BTx082 | TTAAAGGAA | UUAAAGGAA | 6.12 | 1.81 | 16.81 | 18.06 | 0 | 2.92 | 1.81 | 3.07 | 0 | 2.5 | 0 | 0 |
| PV57- | | AGTAATGGA | AGUAAUGGA | | | | | | | | | | | | |
| G18- | | CCAGT | CCAGU | | | | | | | | | | | | |
| ACM- | | | | | | | | | | | | | | | |
| 3338 | | | | | | | | | | | | | | | |
| S090- | PCR_BTx082 | TTAAAGGAA | UUAAAGGAA | 5.62 | 2.25 | 19.1 | 18.18 | 0 | 2.25 | 3.41 | 1.56 | 0 | 1.12 | 0 | 1.14 |
| PV65- | | AGTAATGGA | AGUAAUGGA | | | | | | | | | | | | |
| G18- | | CCAGT | CCAGU | | | | | | | | | | | | |
| ACM- | | | | | | | | | | | | | | | |
| 3340 | | | | | | | | | | | | | | | |

TABLE 29
ALS guide 19

| sample | seq_name | target_site_seq | Guide | C8T |
|---|---|---|---|---|
| S271-PV217- | PCR_ | TTACTTTCCTTTAAG | UUACUUUCCUUUAA | 0 |
| G19-ACM391- | BTx082 | AAAAGTGC | GAAAAGUGC | |
| 2538 | | | | |
| S272-PV217- | PCR_ | TTACTTTCCTTTAAG | UUACUUUCCUUUAA | 0.03 |
| G19-ACM391- | BTx082 | AAAAGTGC | GAAAAGUGC | |
| 2539 | | | | |
| S273-PV217- | PCR_ | TTACTTTCCTTTAAG | UUACUUUCCUUUAA | 0 |
| G19-ACM391- | BTx082 | AAAAGTGC | GAAAAGUGC | |
| 2540 | | | | |
| S274-PV225- | PCR_ | TTACTTTCCTTTAAG | UUACUUUCCUUUAA | 0.85 |
| G19-ACM399- | BTx082 | AAAAGTGC | GAAAAGUGC | |
| 2562 | | | | |
| S275-PV225- | PCR_ | TTACTTTCCTTTAAG | UUACUUUCCUUUAA | 0.68 |
| G19-ACM399- | BTx082 | AAAAGTGC | GAAAAGUGC | |
| 2563 | | | | |
| S276-PV225- | PCR_ | TTACTTTCCTTTAAG | UUACUUUCCUUUAA | 0.71 |
| G19-ACM399- | BTx082 | AAAAGTGC | GAAAAGUGC | |
| 2564 | | | | |
| S277-PV233- | PCR_ | TTACTTTCCTTTAAG | UUACUUUCCUUUAA | 0.01 |
| G19-ACM407- | BTx082 | AAAAGTGC | GAAAAGUGC | |
| 2586 | | | | |
| S278-PV233- | PCR_ | TTACTTTCCTTTAAG | UUACUUUCCUUUAA | 0.01 |
| G19-ACM407- | BTx082 | AAAAGTGC | GAAAAGUGC | |
| 2587 | | | | |
| S279-PV233- | PCR_ | TTACTTTCCTTTAAG | UUACUUUCCUUUAA | 0.01 |
| G19-ACM407- | BTx082 | AAAAGTGC | GAAAAGUGC | |
| 2588 | | | | |
| S283-PV218- | PCR_ | TTACTTTCCTTTAAG | UUACUUUCCUUUAA | 0.03 |
| G19-ACM392- | BTx082 | AAAAGTGC | GAAAAGUGC | |
| 2541 | | | | |
| S284-PV218- | PCR_ | TTACTTTCCTTTAAG | UUACUUUCCUUUAA | 0 |
| G19-ACM392- | BTx082 | AAAAGTGC | GAAAAGUGC | |
| 2542 | | | | |
| S285-PV218- | PCR_ | TTACTTTCCTTTAAG | UUACUUUCCUUUAA | 0 |
| G19-ACM392- | BTx082 | AAAAGTGC | GAAAAGUGC | |
| 2543 | | | | |
| S286-PV226- | PCR_ | TTACTTTCCTTTAAG | UUACUUUCCUUUAA | 0.41 |
| G19-ACM400- | BTx082 | AAAAGTGC | GAAAAGUGC | |
| 2565 | | | | |
| S287-PV226- | PCR_ | TTACTTTCCTTTAAG | UUACUUUCCUUUAA | 0.38 |
| G19-ACM400- | BTx082 | AAAAGTGC | GAAAAGUGC | |
| 2566 | | | | |
| S288-PV226- | PCR_ | TTACTTTCCTTTAAG | UUACUUUCCUUUAA | 0.58 |
| G19-ACM400- | BTx082 | AAAAGTGC | GAAAAGUGC | |
| 2567 | | | | |
| S289-PV266- | PCR_ | TTACTTTCCTTTAAG | UUACUUUCCUUUAA | 0.02 |
| G19-ACM408- | BTx082 | AAAAGTGC | GAAAAGUGC | |
| 2589 | | | | |
| S290-PV266- | PCR_ | TTACTTTCCTTTAAG | UUACUUUCCUUUAA | 0 |
| G19-ACM408- | BTx082 | AAAAGTGC | GAAAAGUGC | |
| 2590 | | | | |
| S291-PV266- | PCR_ | TTACTTTCCTTTAAG | UUACUUUCCUUUAA | 0 |
| G19-ACM408- | BTx082 | AAAAGTGC | GAAAAGUGC | |
| 2591 | | | | |
| S295-PV219- | PCR_ | TTACTTTCCTTTAAG | UUACUUUCCUUUAA | 0.01 |
| G19-ACM393- | BTx082 | AAAAGTGC | GAAAAGUGC | |
| 2544 | | | | |
| S296-PV219- | PCR_ | TTACTTTCCTTTAAG | UUACUUUCCUUUAA | 0.02 |
| G19-ACM393- | BTx082 | AAAAGTGC | GAAAAGUGC | |
| 2545 | | | | |
| S297-PV219- | PCR_ | TTACTTTCCTTTAAG | UUACUUUCCUUUAA | 0 |
| G19-ACM393- | BTx082 | AAAAGTGC | GAAAAGUGC | |
| 2546 | | | | |
| S298-PV227- | PCR_ | TTACTTTCCTTTAAG | UUACUUUCCUUUAA | 0.12 |
| G19-ACM401- | BTx082 | AAAAGTGC | GAAAAGUGC | |
| 2568 | | | | |
| S299-PV227- | PCR_ | TTACTTTCCTTTAAG | UUACUUUCCUUUAA | 0.15 |
| G19-ACM401- | BTx082 | AAAAGTGC | GAAAAGUGC | |
| 2569 | | | | |
| S300-PV227- | PCR_ | TTACTTTCCTTTAAG | UUACUUUCCUUUAA | 0.09 |
| G19-ACM401- | BTx082 | AAAAGTGC | GAAAAGUGC | |
| 2570 | | | | |
| S301-PV267- | PCR_ | TTACTTTCCTTTAAG | UUACUUUCCUUUAA | 0.03 |
| G19-ACM409- | BTx082 | AAAAGTGC | GAAAAGUGC | |
| 2592 | | | | |
| S302-PV267- | PCR_ | TTACTTTCCTTTAAG | UUACUUUCCUUUAA | 0.03 |
| G19-ACM409- | BTx082 | AAAAGTGC | GAAAAGUGC | |
| 2593 | | | | |
| S303-PV267- | PCR_ | TTACTTTCCTTTAAG | UUACUUUCCUUUAA | 0.04 |
| G19-ACM409- | BTx082 | AAAAGTGC | GAAAAGUGC | |
| 2594 | | | | |
| S307-PV220- | PCR_ | TTACTTTCCTTTAAG | UUACUUUCCUUUAA | 0.18 |
| G19-ACM394- | BTx082 | AAAAGTGC | GAAAAGUGC | |
| 2547 | | | | |
| S308-PV220- | PCR_ | TTACTTTCCTTTAAG | UUACUUUCCUUUAA | 0.09 |
| G19-ACM394- | BTx082 | AAAAGTGC | GAAAAGUGC | |
| 2548 | | | | |
| S309-PV220- | PCR_ | TTACTTTCCTTTAAG | UUACUUUCCUUUAA | 0.06 |
| G19-ACM394- | BTx082 | AAAAGTGC | GAAAAGUGC | |
| 2549 | | | | |
| S310-PV228- | PCR_ | TTACTTTCCTTTAAG | UUACUUUCCUUUAA | 0.02 |
| G19-ACM402- | BTx082 | AAAAGTGC | GAAAAGUGC | |
| 2571 | | | | |
| S311-PV228- | PCR_ | TTACTTTCCTTTAAG | UUACUUUCCUUUAA | 0.02 |
| G19-ACM402- | BTx082 | AAAAGTGC | GAAAAGUGC | |
| 2572 | | | | |
| S312-PV228- | PCR_ | TTACTTTCCTTTAAG | UUACUUUCCUUUAA | 0.03 |
| G19-ACM402- | BTx082 | AAAAGTGC | GAAAAGUGC | |
| 2573 | | | | |
| S313-PV268- | PCR_ | TTACTTTCCTTTAAG | UUACUUUCCUUUAA | 0.02 |
| G19-ACM410- | BTx082 | AAAAGTGC | GAAAAGUGC | |
| 2595 | | | | |
| S314-PV268- | PCR_ | TTACTTTCCTTTAAG | UUACUUUCCUUUAA | 0.01 |
| G19-ACM410- | BTx082 | AAAAGTGC | GAAAAGUGC | |
| 2596 | | | | |
| S315-PV268- | PCR_ | TTACTTTCCTTTAAG | UUACUUUCCUUUAA | 0.02 |
| G19-ACM410- | BTx082 | AAAAGTGC | GAAAAGUGC | |
| 2597 | | | | |
| S319-PV221- | PCR_ | TTACTTTCCTTTAAG | UUACUUUCCUUUAA | 0.61 |
| G19-ACM395- | BTx082 | AAAAGTGC | GAAAAGUGC | |
| 2550 | | | | |
| S320-PV221- | PCR_ | TTACTTTCCTTTAAG | UUACUUUCCUUUAA | 0.23 |
| G19-ACM395- | BTx082 | AAAAGTGC | GAAAAGUGC | |
| 2551 | | | | |
| S321-PV221- | PCR_ | TTACTTTCCTTTAAG | UUACUUUCCUUUAA | 0.37 |
| G19-ACM395- | BTx082 | AAAAGTGC | GAAAAGUGC | |
| 2552 | | | | |
| S322-PV229- | PCR_ | TTACTTTCCTTTAAG | UUACUUUCCUUUAA | 0.12 |
| G19-ACM403- | BTx082 | AAAAGTGC | GAAAAGUGC | |
| 2574 | | | | |
| S323-PV229- | PCR_ | TTACTTTCCTTTAAG | UUACUUUCCUUUAA | 0.12 |
| G19-ACM403- | BTx082 | AAAAGTGC | GAAAAGUGC | |
| 2575 | | | | |
| S324-PV229- | PCR_ | TTACTTTCCTTTAAG | UUACUUUCCUUUAA | 0.11 |
| G19-ACM403- | BTx082 | AAAAGTGC | GAAAAGUGC | |
| 2576 | | | | |
| S325-PV269- | PCR_ | TTACTTTCCTTTAAG | UUACUUUCCUUUAA | 0.01 |
| G19-ACM411- | BTx082 | AAAAGTGC | GAAAAGUGC | |
| 2598 | | | | |
| S326-PV269- | PCR_ | TTACTTTCCTTTAAG | UUACUUUCCUUUAA | 0 |
| G19-ACM411- | BTx082 | AAAAGTGC | GAAAAGUGC | |
| 2599 | | | | |
| S327-PV269- | PCR_ | TTACTTTCCTTTAAG | UUACUUUCCUUUAA | 0 |
| G19-ACM411- | BTx082 | AAAAGTGC | GAAAAGUGC | |
| 2600 | | | | |
| S330-PV222- | PCR_ | TTACTTTCCTTTAAG | UUACUUUCCUUUAA | 0.06 |
| G19-ACM396- | BTx082 | AAAAGTGC | GAAAAGUGC | |
| 2553 | | | | |
| S331-PV222- | PCR_ | TTACTTTCCTTTAAG | UUACUUUCCUUUAA | 0.03 |
| G19-ACM396- | BTx082 | AAAAGTGC | GAAAAGUGC | |
| 2554 | | | | |
| S332-PV222- | PCR_ | TTACTTTCCTTTAAG | UUACUUUCCUUUAA | 0.02 |
| G19-ACM396- | BTx082 | AAAAGTGC | GAAAAGUGC | |
| 2555 | | | | |
| S333-PV230- | PCR_ | TTACTTTCCTTTAAG | UUACUUUCCUUUAA | 1.35 |
| G19-ACM404- | BTx082 | AAAAGTGC | GAAAAGUGC | |
| 2577 | | | | |
| S334-PV230- | PCR_ | TTACTTTCCTTTAAG | UUACUUUCCUUUAA | 1.34 |
| G19-ACM404- | BTx082 | AAAAGTGC | GAAAAGUGC | |
| 2578 | | | | |
| S335-PV230- | PCR_ | TTACTTTCCTTTAAG | UUACUUUCCUUUAA | 1.57 |
| G19-ACM404- | BTx082 | AAAAGTGC | GAAAAGUGC | |
| 2579 | | | | |
| S336-PV270- | PCR_ | TTACTTTCCTTTAAG | UUACUUUCCUUUAA | 0 |
| G19-ACM412- | BTx082 | AAAAGTGC | GAAAAGUGC | |
| 2601 | | | | |
| S337-PV270- | PCR_ | TTACTTTCCTTTAAG | UUACUUUCCUUUAA | 0 |
| G19-ACM412- | BTx082 | AAAAGTGC | GAAAAGUGC | |
| 2602 | | | | |
| S338-PV270- | PCR_ | TTACTTTCCTTTAAG | UUACUUUCCUUUAA | 0 |
| G19-ACM412- | BTx082 | AAAAGTGC | GAAAAGUGC | |
| 2603 | | | | |
| S341-PV223- | PCR_ | TTACTTTCCTTTAAG | UUACUUUCCUUUAA | 0.94 |
| G19-ACM397- | BTx082 | AAAAGTGC | GAAAAGUGC | |
| 2556 | | | | |
| S342-PV223- | PCR_ | TTACTTTCCTTTAAG | UUACUUUCCUUUAA | 0.74 |
| G19-ACM397- | BTx082 | AAAAGTGC | GAAAAGUGC | |
| 2557 | | | | |
| S343-PV223- | PCR_ | TTACTTTCCTTTAAG | UUACUUUCCUUUAA | 0.51 |
| G19-ACM397- | BTx082 | AAAAGTGC | GAAAAGUGC | |
| 2558 | | | | |
| S344-PV231- | PCR_ | TTACTTTCCTTTAAG | UUACUUUCCUUUAA | 0.06 |
| G19-ACM405- | BTx082 | AAAAGTGC | GAAAAGUGC | |
| 2580 | | | | |
| S345-PV231- | PCR_ | TTACTTTCCTTTAAG | UUACUUUCCUUUAA | 0.05 |
| G19-ACM405- | BTx082 | AAAAGTGC | GAAAAGUGC | |
| 2581 | | | | |
| S346-PV231- | PCR_ | TTACTTTCCTTTAAG | UUACUUUCCUUUAA | 0.11 |
| G19-ACM405- | BTx082 | AAAAGTGC | GAAAAGUGC | |
| 2582 | | | | |
| S347-PV271- | PCR_ | TTACTTTCCTTTAAG | UUACUUUCCUUUAA | 0.02 |
| G19-ACM413- | BTx082 | AAAAGTGC | GAAAAGUGC | |
| 2604 | | | | |
| S348-PV271- | PCR_ | TTACTTTCCTTTAAG | UUACUUUCCUUUAA | 0.01 |
| G19-ACM413- | BTx082 | AAAAGTGC | GAAAAGUGC | |
| 2605 | | | | |
| S349-PV271- | PCR_ | TTACTTTCCTTTAAG | UUACUUUCCUUUAA | 0.01 |
| G19-ACM413- | BTx082 | AAAAGTGC | GAAAAGUGC | |
| 2606 | | | | |
| S352-PV224- | PCR_ | TTACTTTCCTTTAAG | UUACUUUCCUUUAA | 0.1 |
| G19-ACM398- | BTx082 | AAAAGTGC | GAAAAGUGC | |
| 2559 | | | | |
| S353-PV224- | PCR_ | TTACTTTCCTTTAAG | UUACUUUCCUUUAA | 0.13 |
| G19-ACM398- | BTx082 | AAAAGTGC | GAAAAGUGC | |
| 2560 | | | | |
| S354-PV224- | PCR_ | TTACTTTCCTTTAAG | UUACUUUCCUUUAA | 0.06 |
| G19-ACM398- | BTx082 | AAAAGTGC | GAAAAGUGC | |
| 2561 | | | | |
| S355-PV232- | PCR_ | TTACTTTCCTTTAAG | UUACUUUCCUUUAA | 0.2 |
| G19-ACM406- | BTx082 | AAAAGTGC | GAAAAGUGC | |
| 2583 | | | | |
| S356-PV232- | PCR_ | TTACTTTCCTTTAAG | UUACUUUCCUUUAA | 0.29 |
| G19-ACM406- | BTx082 | AAAAGTGC | GAAAAGUGC | |
| 2584 | | | | |
| S357-PV232- | PCR_ | TTACTTTCCTTTAAG | UUACUUUCCUUUAA | 0.16 |
| G19-ACM406- | BTx082 | AAAAGTGC | GAAAAGUGC | |
| 2585 | | | | |
| S358-Water- | PCR_ | TTACTTTCCTTTAAG | UUACUUUCCUUUAA | 0.01 |
| G19-ACM414- | BTx082 | AAAAGTGC | GAAAAGUGC | |
| 2607 | | | | |
| S359-Water- | PCR_ | TTACTTTCCTTTAAG | UUACUUUCCUUUAA | 0.01 |
| G19-ACM414- | BTx082 | AAAAGTGC | GAAAAGUGC | |
| 2608 | | | | |
| S360-Water- | PCR_ | TTACTTTCCTTTAAG | UUACUUUCCUUUAA | 0 |
| G19-ACM414- | BTx082 | AAAAGTGC | GAAAAGUGC | |
| 2609 | | | | |

TABLE 30
ALS guide 21

| sample | seq_name | target_site_seq | Guide | C5T | C8T | C9T |
|---|---|---|---|---|---|---|
| S003- | PCR_ | GGTACAGCCTATT | GGUACAGCCUAUU | 0.02 | 0.02 | 0.01 |
| Control- | BTx076 | TATAAGAAGA | UAUAAGAAGA | | | |
| G21-ACM- | | | | | | |
| 3327 | | | | | | |
| S015- | PCR_ | GGTACAGCCTATT | GGUACAGCCUAUU | 0.01 | 0.01 | 0.04 |
| Control- | BTx076 | TATAAGAAGA | UAUAAGAAGA | | | |
| G21-ACM- | | | | | | |
| 3327 | | | | | | |
| S062- | PCR_ | GGTACAGCCTATT | GGUACAGCCUAUU | 9.46 | 0.74 | 0.51 |
| PV284- | BTx076 | TATAAGAAGA | UAUAAGAAGA | | | |
| G21-ACM- | | | | | | |
| 3326 | | | | | | |
| S074- | PCR_ | GGTACAGCCTATT | GGUACAGCCUAUU | 13.39 | 0.23 | 0.16 |
| PV284- | BTx076 | TATAAGAAGA | UAUAAGAAGA | | | |
| G21-ACM- | | | | | | |
| 3326 | | | | | | |
| S086- | PCR_ | GGTACAGCCTATT | GGUACAGCCUAUU | 10.84 | 0.37 | 0.16 |
| PV284- | BTx076 | TATAAGAAGA | UAUAAGAAGA | | | |
| G21-ACM- | | | | | | |
| 3326 | | | | | | |

TABLE 31
ALS guide 22

| | seq_ | | | | | | | | | |
|---|---|---|---|---|---|---|---|---|---|---|
| sample | name | target_site_seq | Guide | C4T | C7T | C8T | C9T | C10T | C12T | C14T |
| S190- | PCR_ | ATGCTTCCCC | AUGCUUCCCC | 18.36 | 42.98 | 39.09 | 17.56 | 4.32 | 2.15 | 0.32 |
| SOD1- | BTx082 | ACACCTTCAC | ACACCUUCAC | | | | | | | |
| Guide | | TGG | UGG | | | | | | | |
| 22- | | | | | | | | | | |
| 268 | | | | | | | | | | |
| S191- | PCR_ | ATGCTTCCCC | AUGCUUCCCC | 12.9 | 30.29 | 20.43 | 14.61 | 11.07 | 13.08 | 1.52 |
| SOD1- | BTx082 | ACACCTTCAC | ACACCUUCAC | | | | | | | |
| Guide | | TGG | UGG | | | | | | | |
| 22- | | | | | | | | | | |
| 269 | | | | | | | | | | |
| S192- | PCR_ | ATGCTTCCCC | AUGCUUCCCC | 13.86 | 24.63 | 16.51 | 12.14 | 9.46 | 11.33 | 0.93 |
| SOD1- | BTx082 | ACACCTTCAC | ACACCUUCAC | | | | | | | |
| Guide | | TGG | UGG | | | | | | | |
| 22- | | | | | | | | | | |
| 270 | | | | | | | | | | |
| S193- | PCR_ | ATGCTTCCCC | AUGCUUCCCC | 7.56 | 60.37 | 59.57 | 53.45 | 24.74 | 0.59 | 0.26 |
| SOD1- | BTx082 | ACACCTTCAC | ACACCUUCAC | | | | | | | |
| Guide | | TGG | UGG | | | | | | | |
| 22- | | | | | | | | | | |
| 271 | | | | | | | | | | |
| S194- | PCR_ | ATGCTTCCCC | AUGCUUCCCC | 0 | 0 | 0.02 | 0.03 | 0 | 0 | 0 |
| SOD1- | BTx082 | ACACCTTCAC | ACACCUUCAC | | | | | | | |
| Guide | | TGG | UGG | | | | | | | |
| 22- | | | | | | | | | | |
| water | | | | | | | | | | |
| S195- | PCR_ | ATGCTTCCCC | AUGCUUCCCC | 17.96 | 41.82 | 37.62 | 16.28 | 4.05 | 1.98 | 0.46 |
| SOD1- | BTx082 | ACACCTTCAC | ACACCUUCAC | | | | | | | |
| Guide | | TGG | UGG | | | | | | | |
| 22- | | | | | | | | | | |
| 268 | | | | | | | | | | |
| S196- | PCR_ | ATGCTTCCCC | AUGCUUCCCC | 13.73 | 32.36 | 21.55 | 14.76 | 11.27 | 13.88 | 1.49 |
| SOD1- | BTx082 | ACACCTTCAC | ACACCUUCAC | | | | | | | |
| Guide | | TGG | UGG | | | | | | | |
| 22- | | | | | | | | | | |
| 269 | | | | | | | | | | |
| S197- | PCR_ | ATGCTTCCCC | AUGCUUCCCC | 12.97 | 23.85 | 15.85 | 11.35 | 8.83 | 10.98 | 0.99 |
| SOD1- | BTx082 | ACACCTTCAC | ACACCUUCAC | | | | | | | |
| Guide | | TGG | UGG | | | | | | | |
| 22- | | | | | | | | | | |
| 270 | | | | | | | | | | |
| S198- | PCR_ | ATGCTTCCCC | AUGCUUCCCC | 8.16 | 63.53 | 62.38 | 56.32 | 25.87 | 0.56 | 0.37 |
| SOD1- | BTx082 | ACACCTTCAC | ACACCUUCAC | | | | | | | |
| Guide | | TGG | UGG | | | | | | | |
| 22- | | | | | | | | | | |
| 271 | | | | | | | | | | |
| S199- | PCR_ | ATGCTTCCCC | AUGCUUCCCC | 0.01 | 0 | 0 | 0.01 | 0.03 | 0 | 0 |
| SOD1- | BTx082 | ACACCTTCAC | ACACCUUCAC | | | | | | | |
| Guide | | TGG | UGG | | | | | | | |
| 22- | | | | | | | | | | |
| water | | | | | | | | | | |
| S200- | PCR_ | ATGCTTCCCC | AUGCUUCCCC | 16.82 | 39.34 | 35.68 | 15.56 | 3.33 | 1.97 | 0.34 |
| SOD1- | BTx082 | ACACCTTCAC | ACACCUUCAC | | | | | | | |
| Guide | | TGG | UGG | | | | | | | |
| 22- | | | | | | | | | | |
| 268 | | | | | | | | | | |
| S201- | PCR_ | ATGCTTCCCC | AUGCUUCCCC | 13.32 | 30.97 | 20.53 | 14.13 | 10.7 | 13.94 | 1.39 |
| SOD1- | BTx082 | ACACCTTCAC | ACACCUUCAC | | | | | | | |
| Guide | | TGG | UGG | | | | | | | |
| 22- | | | | | | | | | | |
| 269 | | | | | | | | | | |
| S202- | PCR_ | ATGCTTCCCC | AUGCUUCCCC | 12.71 | 22.84 | 15.17 | 11.09 | 8.76 | 10.78 | 0.08 |
| SOD1- | BTx082 | ACACCTTCAC | ACACCUUCAC | | | | | | | |
| Guide | | TGG | UGG | | | | | | | |
| 22- | | | | | | | | | | |
| 270 | | | | | | | | | | |
| S203- | PCR_ | ATGCTTCCCC | AUGCUUCCCC | 8.38 | 63.26 | 62.39 | 56.55 | 25.54 | 0.7 | 0.19 |
| SOD1- | BTx082 | ACACCTTCAC | ACACCUUCAC | | | | | | | |
| Guide | | TGG | UGG | | | | | | | |
| 22- | | | | | | | | | | |
| 271 | | | | | | | | | | |
| S204- | PCR_ | ATGCTTCCCC | AUGCUUCCCC | 0.02 | 0.04 | 0.01 | 0 | 0.01 | 0.02 | 0 |
| SOD1- | BTx082 | ACACCTTCAC | ACACCUUCAC | | | | | | | |
| Guide | | TGG | UGG | | | | | | | |
| 22- | | | | | | | | | | |
| water | | | | | | | | | | |

TABLE 32
ALS guide 24

| sample | seq_name | target_site_seq | Guide | A4G | A7G |
|---|---|---|---|---|---|
| S007-PV1- | PCR_ | TTCATTATTAGGCA | UUCAUUAUUAGGCA | 0.09 | 2.02 |
| G24- | BTx077 | TGTTGGAGA | UGUUGGAGA | | |
| ACM431- | | | | | |
| 2658 | | | | | |
| S008-PV1- | PCR_ | TTCATTATTAGGCA | UUCAUUAUUAGGCA | 0.04 | 2.41 |
| G24- | BTx077 | TGTTGGAGA | UGUUGGAGA | | |
| ACM431- | | | | | |
| 2659 | | | | | |
| S009-PV1- | PCR_ | TTCATTATTAGGCA | UUCAUUAUUAGGCA | 0.06 | 1.68 |
| G24- | BTx077 | TGTTGGAGA | UGUUGGAGA | | |
| ACM431- | | | | | |
| 2660 | | | | | |
| S010-PV9- | PCR_ | TTCATTATTAGGCA | UUCAUUAUUAGGCA | 0.5 | 4.2 |
| G24- | BTx077 | TGTTGGAGA | UGUUGGAGA | | |
| ACM439- | | | | | |
| 2682 | | | | | |
| S011-PV9- | PCR_ | TTCATTATTAGGCA | UUCAUUAUUAGGCA | 0.4 | 4.36 |
| G24- | BTx077 | TGTTGGAGA | UGUUGGAGA | | |
| ACM439- | | | | | |
| 2683 | | | | | |
| S012-PV9- | PCR_ | TTCATTATTAGGCA | UUCAUUAUUAGGCA | 0.45 | 3.72 |
| G24- | BTx077 | TGTTGGAGA | UGUUGGAGA | | |
| ACM439- | | | | | |
| 2684 | | | | | |
| S019-PV2- | PCR_ | TTCATTATTAGGCA | UUCAUUAUUAGGCA | 0.05 | 1.36 |
| G24- | BTx077 | TGTTGGAGA | UGUUGGAGA | | |
| ACM432- | | | | | |
| 2661 | | | | | |
| S020-PV2- | PCR_ | TTCATTATTAGGCA | UUCAUUAUUAGGCA | 0.01 | 0.84 |
| G24- | BTx077 | TGTTGGAGA | UGUUGGAGA | | |
| ACM432- | | | | | |
| 2662 | | | | | |
| S021-PV2- | PCR_ | TTCATTATTAGGCA | UUCAUUAUUAGGCA | 0.01 | 0.29 |
| G24- | BTx077 | TGTTGGAGA | UGUUGGAGA | | |
| ACM432- | | | | | |
| 2663 | | | | | |
| S022-PV10- | PCR_ | TTCATTATTAGGCA | UUCAUUAUUAGGCA | 0.04 | 1.89 |
| G24- | BTx077 | TGTTGGAGA | UGUUGGAGA | | |
| ACM440- | | | | | |
| 2685 | | | | | |
| S023-PV10- | PCR_ | TTCATTATTAGGCA | UUCAUUAUUAGGCA | 0.16 | 2.77 |
| G24- | BTx077 | TGTTGGAGA | UGUUGGAGA | | |
| ACM440- | | | | | |
| 2686 | | | | | |
| S024-PV10- | PCR_ | TTCATTATTAGGCA | UUCAUUAUUAGGCA | 0.17 | 2.93 |
| G24- | BTx077 | TGTTGGAGA | UGUUGGAGA | | |
| ACM440- | | | | | |
| 2687 | | | | | |
| S031-PV3- | PCR_ | TTCATTATTAGGCA | UUCAUUAUUAGGCA | 0.05 | 2.13 |
| G24- | BTx077 | TGTTGGAGA | UGUUGGAGA | | |
| ACM433- | | | | | |
| 2664 | | | | | |
| S032-PV3- | PCR_ | TTCATTATTAGGCA | UUCAUUAUUAGGCA | 0.01 | 1.01 |
| G24- | BTx077 | TGTTGGAGA | UGUUGGAGA | | |
| ACM433- | | | | | |
| 2665 | | | | | |
| S033-PV3- | PCR_ | TTCATTATTAGGCA | UUCAUUAUUAGGCA | 0.02 | 0.83 |
| G24- | BTx077 | TGTTGGAGA | UGUUGGAGA | | |
| ACM433- | | | | | |
| 2666 | | | | | |
| S034-PV11- | PCR_ | TTCATTATTAGGCA | UUCAUUAUUAGGCA | 0.02 | 0.66 |
| G24- | BTx077 | TGTTGGAGA | UGUUGGAGA | | |
| ACM441- | | | | | |
| 2688 | | | | | |
| S035-PV11- | PCR_ | TTCATTATTAGGCA | UUCAUUAUUAGGCA | 0.07 | 1.23 |
| G24- | BTx077 | TGTTGGAGA | UGUUGGAGA | | |
| ACM441- | | | | | |
| 2689 | | | | | |
| S036-PV11- | PCR_ | TTCATTATTAGGCA | UUCAUUAUUAGGCA | 0.05 | 1.2 |
| G24- | BTx077 | TGTTGGAGA | UGUUGGAGA | | |
| ACM441- | | | | | |
| 2690 | | | | | |
| S043-PV4- | PCR_ | TTCATTATTAGGCA | UUCAUUAUUAGGCA | 0.03 | 2.87 |
| G24- | BTx077 | TGTTGGAGA | UGUUGGAGA | | |
| ACM434- | | | | | |
| 2667 | | | | | |
| S044-PV4- | PCR_ | TTCATTATTAGGCA | UUCAUUAUUAGGCA | 0.02 | 1.33 |
| G24- | BTx077 | TGTTGGAGA | UGUUGGAGA | | |
| ACM434- | | | | | |
| 2668 | | | | | |
| S045-PV4- | PCR_ | TTCATTATTAGGCA | UUCAUUAUUAGGCA | 0.06 | 0.67 |
| G24- | BTx077 | TGTTGGAGA | UGUUGGAGA | | |
| ACM434- | | | | | |
| 2669 | | | | | |
| S046-PV12- | PCR_ | TTCATTATTAGGCA | UUCAUUAUUAGGCA | 0.07 | 2.35 |
| G24- | BTx077 | TGTTGGAGA | UGUUGGAGA | | |
| ACM442- | | | | | |
| 2691 | | | | | |
| S047-PV12- | PCR_ | TTCATTATTAGGCA | UUCAUUAUUAGGCA | 0.05 | 4.03 |
| G24- | BTx077 | TGTTGGAGA | UGUUGGAGA | | |
| ACM442- | | | | | |
| 2692 | | | | | |
| S048-PV12- | PCR_ | TTCATTATTAGGCA | UUCAUUAUUAGGCA | 0.07 | 4.87 |
| G24- | BTx077 | TGTTGGAGA | UGUUGGAGA | | |
| ACM442- | | | | | |
| 2693 | | | | | |
| S055-PV5- | PCR_ | TTCATTATTAGGCA | UUCAUUAUUAGGCA | 0.05 | 6.58 |
| G24- | BTx077 | TGTTGGAGA | UGUUGGAGA | | |
| ACM435- | | | | | |
| 2670 | | | | | |
| S056-PV5- | PCR_ | TTCATTATTAGGCA | UUCAUUAUUAGGCA | 0.07 | 4.13 |
| G24- | BTx077 | TGTTGGAGA | UGUUGGAGA | | |
| ACM435- | | | | | |
| 2671 | | | | | |
| S057-PV5- | PCR_ | TTCATTATTAGGCA | UUCAUUAUUAGGCA | 0.07 | 2.53 |
| G24- | BTx077 | TGTTGGAGA | UGUUGGAGA | | |
| ACM435- | | | | | |
| 2672 | | | | | |
| S058-PV13- | PCR_ | TTCATTATTAGGCA | UUCAUUAUUAGGCA | 0.69 | 4.02 |
| G24- | BTx077 | TGTTGGAGA | UGUUGGAGA | | |
| ACM443- | | | | | |
| 2694 | | | | | |
| S059-PV13- | PCR_ | TTCATTATTAGGCA | UUCAUUAUUAGGCA | 0.84 | 5.43 |
| G24- | BTx077 | TGTTGGAGA | UGUUGGAGA | | |
| ACM443- | | | | | |
| 2695 | | | | | |
| S060-PV13- | PCR_ | TTCATTATTAGGCA | UUCAUUAUUAGGCA | 0.87 | 7.43 |
| G24- | BTx077 | TGTTGGAGA | UGUUGGAGA | | |
| ACM443- | | | | | |
| 2696 | | | | | |
| S067-PV6- | PCR_ | TTCATTATTAGGCA | UUCAUUAUUAGGCA | 0.07 | 2.22 |
| G24- | BTx077 | TGTTGGAGA | UGUUGGAGA | | |
| ACM436- | | | | | |
| 2673 | | | | | |
| S068-PV6- | PCR_ | TTCATTATTAGGCA | UUCAUUAUUAGGCA | 0.03 | 1.59 |
| G24- | BTx077 | TGTTGGAGA | UGUUGGAGA | | |
| ACM436- | | | | | |
| 2674 | | | | | |
| S069-PV6- | PCR_ | TTCATTATTAGGCA | UUCAUUAUUAGGCA | 0.01 | 0.99 |
| G24- | BTx077 | TGTTGGAGA | UGUUGGAGA | | |
| ACM436- | | | | | |
| 2675 | | | | | |
| S070-PV14- | PCR_ | TTCATTATTAGGCA | UUCAUUAUUAGGCA | 0.63 | 11.4 |
| G24- | BTx077 | TGTTGGAGA | UGUUGGAGA | | |
| ACM444- | | | | | |
| 2697 | | | | | |
| S071-PV14- | PCR_ | TTCATTATTAGGCA | UUCAUUAUUAGGCA | 0.88 | 13.33 |
| G24- | BTx077 | TGTTGGAGA | UGUUGGAGA | | |
| ACM444- | | | | | |
| 2698 | | | | | |
| S072-PV14- | PCR_ | TTCATTATTAGGCA | UUCAUUAUUAGGCA | 0.41 | 10.96 |
| G24- | BTx077 | TGTTGGAGA | UGUUGGAGA | | |
| ACM444- | | | | | |
| 2699 | | | | | |
| S079-PV7- | PCR_ | TTCATTATTAGGCA | UUCAUUAUUAGGCA | 0.14 | 1.89 |
| G24- | BTx077 | TGTTGGAGA | UGUUGGAGA | | |
| ACM437- | | | | | |
| 2676 | | | | | |
| S080-PV7- | PCR_ | TTCATTATTAGGCA | UUCAUUAUUAGGCA | 0.06 | 1.73 |
| G24- | BTx077 | TGTTGGAGA | UGUUGGAGA | | |
| ACM437- | | | | | |
| 2677 | | | | | |
| S081-PV7- | PCR_ | TTCATTATTAGGCA | UUCAUUAUUAGGCA | 0.07 | 1.75 |
| G24- | BTx077 | TGTTGGAGA | UGUUGGAGA | | |
| ACM437- | | | | | |
| 2678 | | | | | |
| S082-PV216- | PCR_ | TTCATTATTAGGCA | UUCAUUAUUAGGCA | 0.02 | 1.12 |
| G24- | BTx077 | TGTTGGAGA | UGUUGGAGA | | |
| ACM445- | | | | | |
| 2700 | | | | | |
| S083-PV216- | PCR_ | TTCATTATTAGGCA | UUCAUUAUUAGGCA | 0.03 | 1.19 |
| G24- | BTx077 | TGTTGGAGA | UGUUGGAGA | | |
| ACM445- | | | | | |
| 2701 | | | | | |
| S084-PV216- | PCR_ | TTCATTATTAGGCA | UUCAUUAUUAGGCA | 0.05 | 1.19 |
| G24- | BTx077 | TGTTGGAGA | UGUUGGAGA | | |
| ACM445- | | | | | |
| 2702 | | | | | |
| S091-PV8- | PCR_ | TTCATTATTAGGCA | UUCAUUAUUAGGCA | 0.15 | 2.88 |
| G24- | BTx077 | TGTTGGAGA | UGUUGGAGA | | |
| ACM438- | | | | | |
| 2679 | | | | | |
| S092-PV8- | PCR_ | TTCATTATTAGGCA | UUCAUUAUUAGGCA | 0.18 | 2.24 |
| G24- | BTx077 | TGTTGGAGA | UGUUGGAGA | | |
| ACM438- | | | | | |
| 2680 | | | | | |
| S093-PV8- | PCR_ | TTCATTATTAGGCA | UUCAUUAUUAGGCA | 0.26 | 2.49 |
| G24- | BTx077 | TGTTGGAGA | UGUUGGAGA | | |
| ACM438- | | | | | |
| 2681 | | | | | |
| S094-Water- | PCR_ | TTCATTATTAGGCA | UUCAUUAUUAGGCA | 0.01 | 0 |
| G24- | BTx077 | TGTTGGAGA | UGUUGGAGA | | |
| ACM446- | | | | | |
| 2703 | | | | | |
| S095-Water- | PCR_ | TTCATTATTAGGCA | UUCAUUAUUAGGCA | 0.02 | 0 |
| G24- | BTx077 | TGTTGGAGA | UGUUGGAGA | | |
| ACM446- | | | | | |
| 2704 | | | | | |
| S096-Water- | PCR_ | TTCATTATTAGGCA | UUCAUUAUUAGGCA | 0.01 | 0.01 |
| G24- | BTx077 | TGTTGGAGA | UGUUGGAGA | | |
| ACM446- | | | | | |
| 2705 | | | | | |

TABLE 33
ALS guide 40

| sample | seq_name | target_site_seq | Guide | C5T | C6T |
|---|---|---|---|---|---|
| S027- | PCR_ | ACAGCCTATTTATA | ACAGCCUAUUUAUA | 14.2 | 28.28 |
| PV284-G40- | BTx076 | AGAAGAAGA | AGAAGAAGA | | |
| ACM-3334 | | | | | |
| S039- | PCR_ | ACAGCCTATTTATA | ACAGCCUAUUUAUA | 11.65 | 23.99 |
| PV284-G40- | BTx076 | AGAAGAAGA | AGAAGAAGA | | |
| ACM-3334 | | | | | |
| S051- | PCR_ | ACAGCCTATTTATA | ACAGCCUAUUUAUA | 13.72 | 25.53 |
| PV284-G40- | BTx076 | AGAAGAAGA | AGAAGAAGA | | |
| ACM-3334 | | | | | |
| S063- | PCR_ | ACAGCCTATTTATA | ACAGCCUAUUUAUA | 0 | 0 |
| Control- | BTx076 | AGAAGAAGA | AGAAGAAGA | | |
| G40-ACM- | | | | | |
| 3335 | | | | | |
| S075- | PCR_ | ACAGCCTATTTATA | ACAGCCUAUUUAUA | 9.09 | 9.09 |
| Control- | BTx076 | AGAAGAAGA | AGAAGAAGA | | |
| G40-ACM- | | | | | |
| 3335 | | | | | |

TABLE 34A
ALS guide 41

| | seq_ | target_ | | | | | | | | |
|---|---|---|---|---|---|---|---|---|---|---|
| sample | name | site_seq | Guide | A1G | A2G | A3G | A5G | G6T | G7T | A12G |
| S193-ACM- | PCR_ | AAATAGGCTGT | AAAUAGGCUGU | 2.79 | 0.95 | 4.3 | 52.11 | 1.11 | 0.62 | 3.91 |
| G41-PV34- | BTx076 | ACCAGTGCAGG | ACCAGUGCAGGU | | | | | | | |
| ACM-Plate3- | | T | | | | | | | | |
| A1-PCR- | | | | | | | | | | |
| BTx076 | | | | | | | | | | |
| S194-ACM- | PCR_ | AAATAGGCTGT | AAAUAGGCUGU | 2.22 | 0.57 | 3.45 | 45.52 | 1.18 | 0.65 | 2.41 |
| G41-PV36- | BTx076 | ACCAGTGCAGG | ACCAGUGCAGGU | | | | | | | |
| ACM-Plate3- | | T | | | | | | | | |
| B1-PCR- | | | | | | | | | | |
| BTx076 | | | | | | | | | | |
| S195-ACM- | PCR_ | AAATAGGCTGT | AAAUAGGCUGU | 2.61 | 0.91 | 4.93 | 51.73 | 1.13 | 0.59 | 4.08 |
| G41-PV57- | BTx076 | ACCAGTGCAGG | ACCAGUGCAGGU | | | | | | | |
| ACM-Plate3- | | T | | | | | | | | |
| C1-PCR- | | | | | | | | | | |
| BTx076 | | | | | | | | | | |
| S196-ACM- | PCR_ | AAATAGGCTGT | AAAUAGGCUGU | 2.35 | 0.83 | 4.19 | 56.36 | 1.16 | 0.62 | 3.63 |
| G41-PV60- | BTx076 | ACCAGTGCAGG | ACCAGUGCAGGU | | | | | | | |
| ACM-Plate3- | | T | | | | | | | | |
| D1-PCR- | | | | | | | | | | |
| BTx076 | | | | | | | | | | |
| S197-ACM- | PCR_ | AAATAGGCTGT | AAAUAGGCUGU | 2.88 | 0.81 | 4.82 | 57.76 | 1.11 | 0.69 | 3.77 |
| G41-PV65- | BTx076 | ACCAGTGCAGG | ACCAGUGCAGGU | | | | | | | |
| ACM-Plate3- | | T | | | | | | | | |
| E1-PCR- | | | | | | | | | | |
| BTx076 | | | | | | | | | | |
| S198-ACM- | PCR_ | AAATAGGCTGT | AAAUAGGCUGU | 0.03 | 0 | 0.03 | 0.41 | 0.68 | 0.69 | 0.03 |
| G41-PV188- | BTx076 | ACCAGTGCAGG | ACCAGUGCAGGU | | | | | | | |
| ACM-Plate3- | PCR_ | T | | | | | | | | |
| F1-PCR- | | | | | | | | | | |
| BTx076 | | | | | | | | | | |
| S199-ACM- | PCR_ | AAATAGGCTGT | AAAUAGGCUGU | 0.03 | 0.01 | 0.03 | 0.56 | 0.67 | 0.62 | 0.03 |
| G41-PV189- | BTx076 | ACCAGTGCAGG | ACCAGUGCAGGU | | | | | | | |
| ACM-Plate3- | | T | | | | | | | | |
| G1-PCR- | | | | | | | | | | |
| BTx076 | | | | | | | | | | |
| S200-ACM- | PCR_ | AAATAGGCTGT | AAAUAGGCUGU | 0.05 | 0.02 | 0.02 | 0.84 | 0.75 | 0.71 | 0.03 |
| G41-PV190- | BTx076 | ACCAGTGCAGG | ACCAGUGCAGGU | | | | | | | |
| ACM-Plate3- | | T | | | | | | | | |
| H1-PCR- | | | | | | | | | | |
| BTx076 | | | | | | | | | | |
| S201-ACM- | PCR_ | AAATAGGCTGT | AAAUAGGCUGU | 4.17 | 1.17 | 4.72 | 58.46 | 1.34 | 0.66 | 3.43 |
| G41-PV34- | BTx076 | ACCAGTGCAGG | ACCAGUGCAGGU | | | | | | | |
| ACM-Plate3- | | T | | | | | | | | |
| A2-PCR- | | | | | | | | | | |
| BTx076 | | | | | | | | | | |
| S202-ACM- | PCR_ | AAATAGGCTGT | AAAUAGGCUGU | 2.1 | 0.59 | 2.78 | 39.92 | 1.02 | 0.64 | 2.36 |
| G41-PV36- | BTx076 | ACCAGTGCAGG | ACCAGUGCAGGU | | | | | | | |
| ACM-Plate3- | | T | | | | | | | | |
| B2-PCR- | | | | | | | | | | |
| BTx076 | | | | | | | | | | |
| S203-ACM- | PCR_ | AAATAGGCTGT | AAAUAGGCUGU | 2.5 | 0.87 | 4.26 | 46.85 | 1.12 | 0.57 | 3.16 |
| G41-PV57- | BTx076 | ACCAGTGCAGG | ACCAGUGCAGGU | | | | | | | |
| ACM-Plate3- | | T | | | | | | | | |
| C2-PCR- | | | | | | | | | | |
| BTx076 | | | | | | | | | | |
| S204-ACM- | PCR_ | AAATAGGCTGT | AAAUAGGCUGU | 2.52 | 0.67 | 3.89 | 52.26 | 1.17 | 0.6 | 3.27 |
| G41-PV60- | BTx076 | ACCAGTGCAGG | ACCAGUGCAGGU | | | | | | | |
| ACM-Plate3- | | T | | | | | | | | |
| D2-PCR- | | | | | | | | | | |
| BTx076 | | | | | | | | | | |
| S205-ACM- | PCR_ | AAATAGGCTGT | AAAUAGGCUGU | 2.72 | 0.87 | 4.48 | 54.25 | 1.25 | 0.66 | 3.58 |
| G41-PV65- | BTx076 | ACCAGTGCAGG | ACCAGUGCAGGU | | | | | | | |
| ACM-Plate3- | | T | | | | | | | | |
| E2-PCR- | | | | | | | | | | |
| BTx076 | | | | | | | | | | |
| S206-ACM- | PCR_ | AAATAGGCTGT | AAAUAGGCUGU | 0.02 | 0.01 | 0.02 | 0.4 | 0.599 | 0.58 | 0.01 |
| G41-PV188- | BTx076 | ACCAGTGCAGG | ACCAGUGCAGGU | | | | | | | |
| ACM-Plate3- | | T | | | | | | | | |
| F2-PCR- | | | | | | | | | | |
| BTx076 | | | | | | | | | | |
| S207-ACM- | PCR_ | AAATAGGCTGT | AAAUAGGCUGU | 0.04 | 0 | 0.01 | 0.53 | 0.86 | 0.77 | 0.01 |
| G41-PV189- | BTx076 | ACCAGTGCAGG | ACCAGUGCAGGU | | | | | | | |
| ACM-Plate3- | | T | | | | | | | | |
| G2-PCR- | | | | | | | | | | |
| BTx076 | | | | | | | | | | |
| S208-ACM- | PCR_ | AAATAGGCTGT | AAAUAGGCUGU | 0.03 | 0.01 | 0.02 | 0.64 | 0.78 | 0.71 | 0.04 |
| G41-PV190- | BTx076 | ACCAGTGCAGG | ACCAGUGCAGGU | | | | | | | |
| ACM-Plate3- | | T | | | | | | | | |
| H2-PCR- | | | | | | | | | | |
| BTx076 | | | | | | | | | | |
| S209-ACM- | PCR_ | AAATAGGCTGT | AAAUAGGCUGU | 2.59 | 0.79 | 3.36 | 47.21 | 1.1 | 0.61 | 3.54 |
| G41-PV34- | BTx076 | ACCAGTGCAGG | ACCAGUGCAGGU | | | | | | | |
| ACM-Plate3- | | T | | | | | | | | |
| A3-PCR- | | | | | | | | | | |
| BTx076 | | | | | | | | | | |
| S210-ACM- | PCR_ | AAATAGGCTGT | AAAUAGGCUGU | 1.85 | 0.57 | 2.63 | 36.24 | 0.95 | 0.57 | 1.86 |
| G41-PV36- | BTx076 | ACCAGTGCAGG | ACCAGUGCAGGU | | | | | | | |
| ACM-Plate3- | | T | | | | | | | | |
| B3-PCR- | | | | | | | | | | |
| BTx076 | | | | | | | | | | |
| S211-ACM- | PCR_ | AAATAGGCTGT | AAAUAGGCUGU | 2.21 | 0.7 | 3.77 | 42.28 | 0.97 | 0.72 | 2.92 |
| G41-PV57- | BTx076 | ACCAGTGCAGG | ACCAGUGCAGGU | | | | | | | |
| ACM-Plate3- | | T | | | | | | | | |
| C3-PCR- | | | | | | | | | | |
| BTx076 | | | | | | | | | | |
| S212-ACM- | PCR_ | AAATAGGCTGT | AAAUAGGCUGU | 2.28 | 0.8 | 3.58 | 48.05 | 1.05 | 0.57 | 2.63 |
| G41-PV60- | BTx076 | ACCAGTGCAGG | ACCAGUGCAGGU | | | | | | | |
| ACM-Plate3- | | T | | | | | | | | |
| D3-PCR- | | | | | | | | | | |
| BTx076 | | | | | | | | | | |
| S213-ACM- | PCR_ | AAATAGGCTGT | AAAUAGGCUGU | 2.51 | 0.93 | 4.11 | 50.94 | 1.22 | 0.69 | 3.2 |
| G41-PV65- | BTx076 | ACCAGTGCAGG | ACCAGUGCAGGU | | | | | | | |
| ACM-Plate3- | | T | | | | | | | | |
| E3-PCR- | | | | | | | | | | |
| BTx076 | | | | | | | | | | |
| S214-ACM- | PCR_ | AAATAGGCTGT | AAAUAGGCUGU | 0.02 | 0.01 | 0.03 | 0.38 | 0.74 | 0.67 | 0.02 |
| G41-PV188- | BTx076 | ACCAGTGCAGG | ACCAGUGCAGGU | | | | | | | |
| ACM-Plate3- | | T | | | | | | | | |
| F3-PCR- | | | | | | | | | | |
| BTx076 | | | | | | | | | | |
| S215-ACM- | PCR_ | AAATAGGCTGT | AAAUAGGCUGU | 0.03 | 0.02 | 0.02 | 0.53 | 0.76 | 0.61 | 0.03 |
| G41-PV189- | BTx076 | ACCAGTGCAGG | ACCAGUGCAGGU | | | | | | | |
| ACM-Plate3- | | T | | | | | | | | |
| G3-PCR- | | | | | | | | | | |
| BTx076 | | | | | | | | | | |
| S216-ACM- | PCR_ | AAATAGGCTGT | AAAUAGGCUGU | 0 | 0 | 0 | 14.29 | 0 | 0 | 0 |
| G41-PV190- | BTx076 | ACCAGTGCAGG | ACCAGUGCAGGU | | | | | | | |
| ACM-Plate3- | | T | | | | | | | | |
| H3-PCR- | | | | | | | | | | |
| BTx076 | | | | | | | | | | |
| S217-ACM- | PCR_ | AAATAGGCTGT | AAAUAGGCUGU | 0.02 | 0.01 | 0.02 | 0.4 | 0.74 | 0.66 | 0 |
| G41-PV191- | BTx076 | ACCAGTGCAGG | ACCAGUGCAGGU | | | | | | | |
| ACM-Plate3- | | T | | | | | | | | |
| A4-PCR- | | | | | | | | | | |
| BTx076 | | | | | | | | | | |
| S218-ACM- | PCR_ | AAATAGGCTGT | AAAUAGGCUGU | 0.04 | 0.02 | 0.07 | 1.21 | 0.76 | 0.74 | 0.05 |
| G41-PV192- | BTx076 | ACCAGTGCAGG | ACCAGUGCAGGU | | | | | | | |
| ACM-Plate3- | | T | | | | | | | | |
| B4-PCR- | | | | | | | | | | |
| BTx076 | | | | | | | | | | |
| S219-ACM- | PCR_ | AAATAGGCTGT | AAAUAGGCUGU | 0.02 | 0.01 | 0.02 | 0.27 | 0.74 | 0.63 | 0 |
| G41-PV193- | BTx076 | ACCAGTGCAGG | ACCAGUGCAGGU | | | | | | | |
| ACM-Plate3- | | T | | | | | | | | |
| C4-PCR- | | | | | | | | | | |
| BTx076 | | | | | | | | | | |
| S220-ACM- | PCR_ | AAATAGGCTGT | AAAUAGGCUGU | 0.02 | 0 | 0.02 | 0.85 | 0.68 | 0.62 | 0.01 |
| G41-PV194- | BTx076 | ACCAGTGCAGG | ACCAGUGCAGGU | | | | | | | |
| ACM-Plate3- | | T | | | | | | | | |
| D4-PCR- | | | | | | | | | | |
| BTx076 | | | | | | | | | | |
| S221-ACM- | PCR_ | AAATAGGCTGT | AAAUAGGCUGU | 0.06 | 0.02 | 0.04 | 1.61 | 0.83 | 0.69 | 0.01 |
| G41-PV195- | BTx076 | ACCAGTGCAGG | ACCAGUGCAGGU | | | | | | | |
| ACM-Plate3- | | T | | | | | | | | |
| E4-PCR- | | | | | | | | | | |
| BTx076 | | | | | | | | | | |
| S222-ACM- | PCR_ | AAATAGGCTGT | AAAUAGGCUGU | 0.08 | 0.03 | 0.03 | 1.78 | 0.73 | 0.65 | 0.01 |
| G41-PV196- | BTx076 | ACCAGTGCAGG | ACCAGUGCAGGU | | | | | | | |
| ACM-Plate3- | | T | | | | | | | | |
| F4-PCR- | | | | | | | | | | |
| BTx076 | | | | | | | | | | |
| S223-ACM- | PCR_ | AAATAGGCTGT | AAAUAGGCUGU | 0.09 | 0.02 | 0.07 | 1.66 | 0.76 | 0.69 | 0.03 |
| G41-PV197- | BTx076 | ACCAGTGCAGG | ACCAGUGCAGGU | | | | | | | |
| ACM-Plate3- | | T | | | | | | | | |
| G4-PCR- | | | | | | | | | | |
| BTx076 | | | | | | | | | | |
| S224-ACM- | PCR_ | AAATAGGCTGT | AAAUAGGCUGU | 0.06 | 0.03 | 0.03 | 1.6 | 0.83 | 0.65 | 0.05 |
| G41-PV198- | BTx076 | ACCAGTGCAGG | ACCAGUGCAGGU | | | | | | | |
| ACM-Plate3- | | T | | | | | | | | |
| H4-PCR- | | | | | | | | | | |
| BTx076 | | | | | | | | | | |
| S225-ACM- | PCR_ | AAATAGGCTGT | AAAUAGGCUGU | 0.01 | 0 | 0.01 | 0.41 | 0.77 | 0.68 | 0 |
| G41-PV191- | BTx076 | ACCAGTGCAGG | ACCAGUGCAGGU | | | | | | | |
| ACM-Plate3- | | T | | | | | | | | |
| A5-PCR- | | | | | | | | | | |
| BTx076 | | | | | | | | | | |
| S226-ACM- | PCR_ | AAATAGGCTGT | AAAUAGGCUGU | 0.05 | 0 | 0.05 | 0.94 | 0.82 | 0.71 | 0.02 |
| G41-PV192- | BTx076 | ACCAGTGCAGG | ACCAGUGCAGGU | | | | | | | |
| ACM-Plate3- | | T | | | | | | | | |
| B5-PCR- | | | | | | | | | | |
| BTx076 | | | | | | | | | | |
| S227-ACM- | PCR_ | AAATAGGCTGT | AAAUAGGCUGU | 0.03 | 0.02 | 0.03 | 0.27 | 0.85 | 0.65 | 0.02 |
| G41-PV193- | BTx076 | ACCAGTGCAGG | ACCAGUGCAGGU | | | | | | | |
| ACM-Plate3- | | T | | | | | | | | |
| C5-PCR- | | | | | | | | | | |
| BTx076 | | | | | | | | | | |
| S228-ACM- | PCR_ | AAATAGGCTGT | AAAUAGGCUGU | 0.03 | 0.02 | 0.04 | 0.86 | 0.76 | 0.69 | 0.02 |
| G41-PV194- | BTx076 | ACCAGTGCAGG | ACCAGUGCAGGU | | | | | | | |
| ACM-Plate3- | | T | | | | | | | | |
| D5-PCR- | | | | | | | | | | |
| BTx076 | | | | | | | | | | |
| S229-ACM- | PCR_ | AAATAGGCTGT | AAAUAGGCUGU | 0.03 | 0.02 | 0.03 | 1.23 | 0.84 | 0.67 | 0 |
| G41-PV195- | BTx076 | ACCAGTGCAGG | ACCAGUGCAGGU | | | | | | | |
| ACM-Plate3- | | T | | | | | | | | |
| E5-PCR- | | | | | | | | | | |
| BTx076 | | | | | | | | | | |
| S230-ACM- | PCR_ | AAATAGGCTGT | AAAUAGGCUGU | 0.04 | 0.05 | 0.06 | 1.61 | 0.83 | 0.67 | 0.04 |
| G41-PV196- | BTx076 | ACCAGTGCAGG | ACCAGUGCAGGU | | | | | | | |
| ACM-Plate3- | | T | | | | | | | | |
| F5-PCR- | | | | | | | | | | |
| BTx076 | | | | | | | | | | |
| S231-ACM- | PCR_ | AAATAGGCTGT | AAAUAGGCUGU | 0.15 | 0.03 | 0.07 | 1.54 | 0.78 | 0.71 | 0.04 |
| G41-PV197- | BTx076 | ACCAGTGCAGG | ACCAGUGCAGGU | | | | | | | |
| ACM-Plate3- | | T | | | | | | | | |
| G5-PCR- | | | | | | | | | | |
| BTx076 | | | | | | | | | | |
| S232-ACM- | PCR_ | AAATAGGCTGT | AAAUAGGCUGU | 0.12 | 0.06 | 0.07 | 2.05 | 0.81 | 0.72 | 0.11 |
| G41-PV198- | BTx076 | ACCAGTGCAGG | ACCAGUGCAGGU | | | | | | | |
| ACM-Plate3- | | T | | | | | | | | |
| H5-PCR- | | | | | | | | | | |
| BTx076 | | | | | | | | | | |
| S233-ACM- | PCR_ | AAATAGGCTGT | AAAUAGGCUGU | 0.02 | 0.01 | 0.02 | 0.35 | 0.77 | 0.65 | 0.02 |
| G41-PV191- | BTx076 | ACCAGTGCAGG | ACCAGUGCAGGU | | | | | | | |
| ACM-Plate3- | | T | | | | | | | | |
| A6-PCR- | | | | | | | | | | |
| BTx076 | | | | | | | | | | |
| S234-ACM- | PCR_ | AAATAGGCTGT | AAAUAGGCUGU | 0.09 | 0.04 | 0.09 | 1.01 | 0.76 | 0.68 | 0.04 |
| G41-PV192- | BTx076 | ACCAGTGCAGG | ACCAGUGCAGGU | | | | | | | |
| ACM-Plate3- | | T | | | | | | | | |
| B6-PCR- | | | | | | | | | | |
| BTx076 | | | | | | | | | | |
| S235-ACM- | PCR_ | AAATAGGCTGT | AAAUAGGCUGU | 0.02 | 0.02 | 0.03 | 0.29 | 0.77 | 0.63 | 0.03 |
| G41-PV193- | BTx076 | ACCAGTGCAGG | ACCAGUGCAGGU | | | | | | | |
| ACM-Plate3- | | T | | | | | | | | |
| C6-PCR- | | | | | | | | | | |
| BTx076 | | | | | | | | | | |
| S236-ACM- | PCR_ | AAATAGGCTGT | AAAUAGGCUGU | 0.05 | 0.01 | 0.02 | 0.86 | 0.73 | 0.58 | 0.01 |
| G41-PV194- | BTx076 | ACCAGTGCAGG | ACCAGUGCAGGU | | | | | | | |
| ACM-Plate3- | | T | | | | | | | | |
| D6-PCR- | | | | | | | | | | |
| BTx076 | | | | | | | | | | |
| S237-ACM- | PCR_ | AAATAGGCTGT | AAAUAGGCUGU | 0.04 | 0.02 | 0.04 | 1.63 | 0.66 | 0.62 | 0.02 |
| G41-PV195- | BTx076 | ACCAGTGCAGG | ACCAGUGCAGGU | | | | | | | |
| ACM-Plate3- | | T | | | | | | | | |
| E6-PCR- | | | | | | | | | | |
| BTx076 | | | | | | | | | | |
| S238-ACM- | PCR_ | AAATAGGCTGT | AAAUAGGCUGU | 0.06 | 0.03 | 0.05 | 1.47 | 0.79 | 0.68 | 0.01 |
| G41-PV196- | BTx076 | ACCAGTGCAGG | ACCAGUGCAGGU | | | | | | | |
| ACM-Plate3- | | T | | | | | | | | |
| F6-PCR- | | | | | | | | | | |
| BTx076 | | | | | | | | | | |
| S239-ACM- | PCR_ | AAATAGGCTGT | AAAUAGGCUGU | 0.07 | 0.03 | 0.07 | 1.42 | 0.72 | 0.61 | 0.02 |
| G41-PV197- | BTx076 | ACCAGTGCAGG | ACCAGUGCAGGU | | | | | | | |
| ACM-Plate3- | | T | | | | | | | | |
| G6-PCR- | | | | | | | | | | |
| BTx076 | | | | | | | | | | |
| S240-ACM- | PCR_ | AAATAGGCTGT | AAAUAGGCUGU | 0 | 0 | 0 | 0 | 0 | 0 | 0 |
| G41-PV198- | BTx076 | ACCAGTGCAGG | ACCAGUGCAGGU | | | | | | | |
| ACM-Plate3- | | T | | | | | | | | |
| H6-PCR- | | | | | | | | | | |
| BTx076 | | | | | | | | | | |

TABLE 34B
ALS guide 41

| | seq_ | target_ | | | | | | | | |
|---|---|---|---|---|---|---|---|---|---|---|
| sample | name | site_seq | Guide | A1G | A2G | A3G | A5G | G6A | A12G | C19A |
| S202- | PCR_ | AAATAGGCTGTA | AAAUAGGCUGUA | 5.88 | 2.06 | 11.3 | 76.09 | 0.01 | 10.25 | 0.02 |
| PV57- | BTx07 | CCAGTGCAGGT | CCAGUGCAGGU | | | | | | | |
| G41- | | | | | | | | | | |
| ACM387- | | | | | | | | | | |
| 2526 | | | | | | | | | | |
| S203- | PCR_ | AAATAGGCTGTA | AAAUAGGCUGUA | 5.81 | 1.73 | 11.56 | 77.68 | 0.06 | 10.93 | 0.02 |
| PV57- | BTx07 | CCAGTGCAGGT | CCAGUGCAGGU | | | | | | | |
| G41- | | | | | | | | | | |
| ACM387- | | | | | | | | | | |
| 2527 | | | | | | | | | | |
| S204- | PCR_ | AAATAGGCTGTA | AAAUAGGCUGUA | 6.2 | 1.82 | 11.66 | 78.88 | 0.01 | 10.38 | 0.01 |
| PV57- | BTx07 | CCAGTGCAGGT | CCAGUGCAGGU | | | | | | | |
| G41- | | | | | | | | | | |
| ACM387- | | | | | | | | | | |
| 2528 | | | | | | | | | | |
| S214- | PCR_ | AAATAGGCTGTA | AAAUAGGCUGUA | 5.1 | 1.47 | 9.29 | 71.6 | 0.02 | 8.77 | 0.01 |
| PV60- | BTx07 | CCAGTGCAGGT | CCAGUGCAGGU | | | | | | | |
| G41- | | | | | | | | | | |
| ACM388- | | | | | | | | | | |
| 2529 | | | | | | | | | | |
| S215- | PCR_ | AAATAGGCTGTA | AAAUAGGCUGUA | 5.53 | 1.57 | 9.45 | 72.96 | 0.01 | 8.3 | 0.01 |
| PV60- | BTx07 | CCAGTGCAGGT | CCAGUGCAGGU | | | | | | | |
| G41- | | | | | | | | | | |
| ACM388- | | | | | | | | | | |
| 2530 | | | | | | | | | | |
| S216- | PCR_ | AAATAGGCTGTA | AAAUAGGCUGUA | 5.37 | 1.5 | 9.57 | 71.68 | 0 | 8.93 | 0.02 |
| PV60- | BTx07 | CCAGTGCAGGT | CCAGUGCAGGU | | | | | | | |
| G41- | | | | | | | | | | |
| ACM388- | | | | | | | | | | |
| 2531 | | | | | | | | | | |
| S226- | PCR_ | AAATAGGCTGTA | AAAUAGGCUGUA | 6.29 | 2.28 | 12.44 | 75.24 | 0 | 11.3 | 0.01 |
| PV65- | BTx07 | CCAGTGCAGGT | CCAGUGCAGGU | | | | | | | |
| G41- | | | | | | | | | | |
| ACM389- | | | | | | | | | | |
| 2532 | | | | | | | | | | |
| S227- | PCR_ | AAATAGGCTGTA | AAAUAGGCUGUA | 6.98 | 1.91 | 12.53 | 75.86 | 0.01 | 10.87 | 0.01 |
| PV65- | BTx07 | CCAGTGCAGGT | CCAGUGCAGGU | | | | | | | |
| G41- | | | | | | | | | | |
| ACM389- | | | | | | | | | | |
| 2533 | | | | | | | | | | |
| S228- | PCR_ | AAATAGGCTGTA | AAAUAGGCUGUA | 5.77 | 2.15 | 11.66 | 71.85 | 0 | 9.46 | 0.01 |
| PV65- | BTx07 | CCAGTGCAGGT | CCAGUGCAGGU | | | | | | | |
| G41- | | | | | | | | | | |
| ACM389- | | | | | | | | | | |
| 2534 | | | | | | | | | | |
| S238- | PCR_ | AAATAGGCTGTA | AAAUAGGCUGUA | 5.98 | 1.96 | 11.17 | 81.01 | 0 | 11.26 | 0.02 |
| Water- | BTx07 | CCAGTGCAGGT | CCAGUGCAGGU | | | | | | | |
| G41- | | | | | | | | | | |
| ACM390- | | | | | | | | | | |
| 2535 | | | | | | | | | | |
| S239- | PCR_ | AAATAGGCTGTA | AAAUAGGCUGUA | 6.11 | 2.01 | 11.71 | 82.33 | 0.01 | 11.92 | 0.03 |
| Water- | BTx07 | CCAGTGCAGGT | CCAGUGCAGGU | | | | | | | |
| G41- | | | | | | | | | | |
| ACM390- | | | | | | | | | | |
| 2536 | | | | | | | | | | |
| S240- | PCR_ | AAATAGGCTGTA | AAAUAGGCUGUA | 5.66 | 1.88 | 11.28 | 79.76 | 0.01 | 10.75 | 0.03 |
| Water- | BTx07 | CCAGTGCAGGT | CCAGUGCAGGU | | | | | | | |
| G41- | | | | | | | | | | |
| ACM390- | | | | | | | | | | |
| 2537 | | | | | | | | | | |
| S262- | PCR_ | AAATAGGCTGTA | AAAUAGGCUGUA | 0 | 62.16 | 61.11 | 61.11 | 61.11 | 0 | 0 |
| 0PV34- | BTx07 | CCAGTGCAGGT | CCAGUGCAGGU | | | | | | | |
| G41- | | | | | | | | | | |
| ACM385- | | | | | | | | | | |
| 2520 | | | | | | | | | | |
| S263- | PCR_ | AAATAGGCTGTA | AAAUAGGCUGUA | 0 | 0.73 | 55.22 | 100 | 0 | 0 | 0 |
| PV34- | BTx07 | CCAGTGCAGGT | CCAGUGCAGGU | | | | | | | |
| G41- | | | | | | | | | | |
| ACM385- | | | | | | | | | | |
| 2521 | | | | | | | | | | |
| S270- | PCR_ | AAATAGGCTGTA | AAAUAGGCUGUA | 0 | 0 | 0 | 100 | 1.03 | 0 | 1.04 |
| PV36- | BTx07 | CCAGTGCAGGT | CCAGUGCAGGU | | | | | | | |
| G41- | | | | | | | | | | |
| ACM386- | | | | | | | | | | |
| 2525 | | | | | | | | | | |

### Cell Culture and Transfection

[1122] The HEK293T (293T) cell line was obtained from the American Tissue Culture Collection (ATCC). 293T cells were maintained in DMEM supplemented with 10% fetal bovine serum and 1% penicillin/streptomycin at 37° C. with 5% CO₂. All cell lines were transfected in 24-well plates with Lipofectamine 2000 (Invitrogen), following the manufacturer's instructions. The amount of DNA used for lipofection was 1 μg per well. Transfection efficiency was routinely higher than 80% for 293T cells as determined by fluorescent microscopy following delivery of a control GFP expression plasmid.

[1123] For plasmid transfections, HEK293T cells were plated and transfected with 250 ng of expression plasmid containing a U6 promoter and encoding the gRNA. and with 750 ng of expression plasmid encoding the Cas9/ABE8 variant base editor using Opti-MEM media and Lipofectamine 2000. The ABE8 base editor variants used included the NGG PAM sequence. The cells were maintained 37° C. with 5% CO₂ for 5 days, with a change of medicum at day 3 post transfection. Thereafter, the cells were lysed; genomic DNA was isolated and PCR was performed using standard procedures, typically using 20-100 ng of template DNA. After the addition of adapters (Illumina), the DNA was subjected to deep sequencing. Base editing at the desired site was analyzed by MiSeq analysis.

[1124] Deep sequencing was performed on PCR amplicons from genomic DNA or RNA harvested from duplicate transfections of 293T cells. After validating the quality of PCR product by gel electrophoresis, the PCR products were isolated by gel extraction, e.g., using the Zymoclean Gel DNA Recovery Kit (Zymo Research). Shotgun libraries were prepared without shearing. The library was quantified by qPCR and sequenced on one MiSeq Nano flowcell for 251 cycles from each end of the fragments using a MiSeq 500-cycle sequencing kit version 2. Fastq files were generated and demultiplexed with the bcl2fastq v2.17.1.14 Conversion Software (Illumina).

### Example 10: A Cytidine Base Editor was Used to Introduce Stop Codons into Exon 1 or Exon 2 of the AR Gene

[1125] The molecular basis of SBMA is the expansion of a trinucleotide CAG repeat in the first exon of the androgen receptor (AR) gene, which encodes the AR polypeptide's polyglutamine (polyQ) tract. Nuclear inclusions containing mutant AR protein are present in motor neurons in the brain stem and spinal cord. The presence of such inclusions is associated with the pathophysiology of SBMA.

[1126] In this Example, a C-to-T base editor system was used to introduce a precise C-to-T mutation in a CAG codon encoding glutamine (Gln) in exon 1 of a mutant AR gene, which includes an expanded trinucleotide repeat. The C-to-T base change converts the target “CAG” nucleic acid sequence to TAG, which results in the premature termination of the protein. In other embodiments, a CBE of the invention changes a CAA to a TAA, a CGA to a TGA, or a TGG to a TGA, TAG, or TAA.

### Example 11:an Adenine Base Editor (ABE) was Used to Disrupt Splice Acceptor and Splice Donor Sites within an AR Polynucleotide

[1127] In this Example, an A-to-G base editor system was used to introduce a precise A-to-G mutation in a splice donor site in exon 1 of a mutant AR gene, which includes an expanded trinucleotide repeat. A C-to-T base editor was used to introduce a precise C-to-T mutation in a splice donor site in exon 1 of a mutant AR gene, which includes an expanded trinucleotide repeat. An A-to-G base editor system was also used to produce a precise A-to-G mutation in a splice acceptor site just prior to Exon 2.

[1128] In each of the above examples, base editing was tested in the HEK293T cell line. The guide RNA (gRNA) used targeted the AR “CAG” with cytidine base editors having the sequences provided below:

BGX5-D10A (CMV to SV40 NLS)
GATTATTGACTAGTTATTAATAGTAATCAATTACGGGGTCATTAGTTCATAGCCCATATATG
GAGTTCCGCGTTACATAACTTACGGTAAATGGCCCGCCTGGCTGACCGCCCAACGACCCCCG
CCCATTGACGTCAATAATGACGTATGTTCCCATAGTAACGCCAATAGGGACTTTCCATTGAC
GTCAATGGGTGGAGTATTTACGGTAAACTGCCCACTTGGCAGTACATCAAGTGTATCATATG
CCAAGTACGCCCCCTATTGACGTCAATGACGGTAAATGGCCCGCCTGGCATTATGCCCAGTA
CATGACCTTATGGGACTTTCCTACTTGGCAGTACATCTACGTATTAGTCATCGCTATTACCA
TGGTGATGCGGTTTTGGCAGTACATCAATGGGCGTGGATAGCGGTTTGACTCACGGGGATTT
CCAAGTCTCCACCCCATTGACGTCAATGGGAGTTTGTTTTGGCACCAAAATCAACGGGACTT
TCCAAAATGTCGTAACAACTCCGCCCCATTGACGCAAATGGGCGGTAGGCGTGTACGGTGGG
AGGTCTATATAAGCAGAGCTGGTTTAGTGAACCGTCAGATCCGCTAGAGATCCGCGGCCGCT
AATACGACTCACTATAGGGAGAGCCGCCACCATGACCTCTGAGAAGGGCCCTAGCACAGGCG
ACCCCACCCTGCGGCGGAGAATCGAGAGCTGGGAGTTCGACGTGTTCTACGACCCTAGAGAA
CTGAGAAAGGAAACCTGCCTGCTGTACGAGATCAAGTGGGGCATGAGCAGAAAGATCTGGCG
GAGCTCTGGCAAGAACACCACCAACCACGTGGAAGTGAATTTCATCAAGAAGTTCACCAGCG
AGAGAAGGTTCCACAGCAGCATCAGCTGCAGCATCACCTGGTTCCTGAGCTGGTCCCCTTGC
TGGGAATGCAGCCAGGCCATCAGAGAGTTCCTGAGCCAACACCCCGGAGTGACACTGGTGAT
CTACGTGGCCAGACTGTTCTGGCACATGGACCAGAGAAACAGACAGGGCCTGAGAGATCTGG
TCAACAGCGGCGTGACTATCCAGATCATGCGGGCCAGCGAGTACTACCACTGTTGGCGGAAC
TTCGTGAACTACCCCCCCGGCGATGAGGCCCACTGGCCTCAGTACCCTCCTCTGTGGATGAT
GCTGTACGCCCTGGAACTGCACTGCATCATCCTGTCTCTGCCTCCATGTCTGAAGATCTCTA
GAAGATGGCAGAACCACCTGGCCTTCTTCAGACTGCACCTGCAGAATTGCCACTACCAGACC
ATCCCCCCCCACATCCTGCTGGCTACAGGCCTGATCCACCCTTCTGTGACCTGGAGACTTAA
GAGCGGAGGATCTAGCGGCGGCTCTAGCGGATCTGAGACACCTGGCACAAGCGAGTCTGCCA
CACCTGAGAGTAGCGGCGGATCTTCTGGTGGCTCTGACAAGAAGTACAGCATCGGCCTGGCC
ATCGGCACCAACTCTGTGGGCTGGGCCGTGATCACCGACGAGTACAAGGTGCCCAGCAAGAA
ATTCAAGGTGCTGGGCAACACCGACCGGCACAGCATCAAGAAGAACCTGATCGGAGCCCTGC
TGTTCGACAGCGGCGAAACAGCCGAGGCCACCCGGCTGAAGAGAACCGCCAGAAGAAGATAC
ACCAGACGGAAGAACCGGATCTGCTATCTGCAAGAGATCTTCAGCAACGAGATGGCCAAGGT
GGACGACAGCTTCTTCCACAGACTGGAAGAGTCCTTCCTGGTGGAAGAGGATAAGAAGCACG
AGCGGCACCCCATCTTCGGCAACATCGTGGACGAGGTGGCCTACCACGAGAAGTACCCCACC
ATCTACCACCTGAGAAAGAAACTGGTGGACAGCACCGACAAGGCCGACCTGCGGCTGATCTA
TCTGGCCCTGGCCCACATGATCAAGTTCCGGGGCCACTTCCTGATCGAGGGCGACCTGAACC
CCGACAACAGCGACGTGGACAAGCTGTTCATCCAGCTGGTGCAGACCTACAACCAGCTGTTC
GAGGAAAACCCCATCAACGCCAGCGGCGTGGACGCCAAGGCCATCCTGTCTGCCAGACTGAG
CAAGAGCAGACGGCTGGAAAATCTGATCGCCCAGCTGCCCGGCGAGAAGAAGAATGGCCTGT
TCGGAAACCTGATTGCCCTGAGCCTGGGCCTGACCCCCAACTTCAAGAGCAACTTCGACCTG
GCCGAGGATGCCAAACTGCAGCTGAGCAAGGACACCTACGACGACGACCTGGACAACCTGCT
GGCCCAGATCGGCGACCAGTACGCCGACCTGTTTCTGGCCGCCAAGAACCTGTCCGACGCCA
TCCTGCTGAGCGACATCCTGAGAGTGAACACCGAGATCACCAAGGCCCCCCTGAGCGCCTCT
ATGATCAAGAGATACGACGAGCACCACCAGGACCTGACCCTGCTGAAAGCTCTCGTGCGGCA
GCAGCTGCCTGAGAAGTACAAAGAGATTTTCTTCGACCAGAGCAAGAACGGCTACGCCGGCT
ACATTGACGGCGGAGCCAGCCAGGAAGAGTTCTACAAGTTCATCAAGCCCATCCTGGAAAAG
ATGGACGGCACCGAGGAACTGCTCGTGAAGCTGAACAGAGAGGACCTGCTGCGGAAGCAGCG
GACCTTCGACAACGGCAGCATCCCCCACCAGATCCACCTGGGAGAGCTGCACGCCATTCTGC
GGCGGCAGGAAGATTTTTACCCATTCCTGAAGGACAACCGGGAAAAGATCGAGAAGATCCTG
ACCTTCCGCATCCCCTACTACGTGGGCCCTCTGGCCAGGGGAAACAGCAGATTCGCCTGGAT
GACCAGAAAGAGCGAGGAAACCATCACCCCCTGGAACTTCGAGGAAGTGGTGGACAAGGGCG
CTTCCGCCCAGAGCTTCATCGAGCGGATGACCAACTTCGATAAGAACCTGCCCAACGAGAAG
GTGCTGCCCAAGCACAGCCTGCTGTACGAGTACTTCACCGTGTATAACGAGCTGACCAAAGT
GAAATACGTGACCGAGGGAATGAGAAAGCCCGCCTTCCTGAGCGGCGAGCAGAAAAAGGCCA
TCGTGGACCTGCTGTTCAAGACCAACCGGAAAGTGACCGTGAAGCAGCTGAAAGAGGACTAC
TTCAAGAAAATCGAGTGCTTCGACTCCGTGGAAATCTCCGGCGTGGAAGATCGGTTCAACGC
CTCCCTGGGCACATACCACGATCTGCTGAAAATTATCAAGGACAAGGACTTCCTGGACAATG
AGGAAAACGAGGACATTCTGGAAGATATCGTGCTGACCCTGACACTGTTTGAGGACAGAGAG
ATGATCGAGGAACGGCTGAAAACCTATGCCCACCTGTTCGACGACAAAGTGATGAAGCAGCT
GAAGCGGCGGAGATACACCGGCTGGGGCAGGCTGAGCCGGAAGCTGATCAACGGCATCCGGG
ACAAGCAGTCCGGCAAGACAATCCTGGATTTCCTGAAGTCCGACGGCTTCGCCAACAGAAAC
TTCATGCAGCTGATCCACGACGACAGCCTGACCTTTAAAGAGGACATCCAGAAAGCCCAGGT
GTCCGGCCAGGGCGATAGCCTGCACGAGCACATTGCCAATCTGGCCGGCAGCCCCGCCATTA
AGAAGGGCATCCTGCAGACAGTGAAGGTGGTGGACGAGCTCGTGAAAGTGATGGGCCGGCAC
AAGCCCGAGAACATCGTGATCGAAATGGCCAGAGAGAACCAGACCACCCAGAAGGGACAGAA
GAACAGCCGCGAGAGAATGAAGCGGATCGAAGAGGGCATCAAAGAGCTGGGCAGCCAGATCC
TGAAAGAACACCCCGTGGAAAACACCCAGCTGCAGAACGAGAAGCTGTACCTGTACTACCTG
CAGAATGGGCGGGATATGTACGTGGACCAGGAACTGGACATCAACCGGCTGTCCGACTACGA
TGTGGACCATATCGTGCCTCAGAGCTTTCTGAAGGACGACTCCATCGACAACAAGGTGCTGA
CCAGAAGCGACAAGAACCGGGGCAAGAGCGACAACGTGCCCTCCGAAGAGGTCGTGAAGAAG
ATGAAGAACTACTGGCGGCAGCTGCTGAACGCCAAGCTGATTACCCAGAGAAAGTTCGACAA
TCTGACCAAGGCCGAGAGAGGCGGCCTGAGCGAACTGGATAAGGCCGGCTTCATCAAGAGAC
AGCTGGTGGAAACCCGGCAGATCACAAAGCACGTGGCACAGATCCTGGACTCCCGGATGAAC
ACTAAGTACGACGAGAATGACAAGCTGATCCGGGAAGTGAAAGTGATCACCCTGAAGTCCAA
GCTGGTGTCCGATTTCCGGAAGGATTTCCAGTTTTACAAAGTGCGCGAGATCAACAACTACC
ACCACGCCCACGACGCCTACCTGAACGCCGTCGTGGGAACCGCCCTGATCAAAAAGTACCCT
AAGCTGGAAAGCGAGTTCGTGTACGGCGACTACAAGGTGTACGACGTGCGGAAGATGATCGC
CAAGAGCGAGCAGGAAATCGGCAAGGCTACCGCCAAGTACTTCTTCTACAGCAACATCATGA
ACTTTTTCAAGACCGAGATTACCCTGGCCAACGGCGAGATCCGGAAGCGGCCTCTGATCGAG
ACAAACGGCGAAACCGGGGAGATCGTGTGGGATAAGGGCCGGGATTTTGCCACCGTGCGGAA
AGTGCTGAGCATGCCCCAAGTGAATATCGTGAAAAAGACCGAGGTGCAGACAGGCGGCTTCA
GCAAAGAGTCTATCCTGCCCAAGAGGAACAGCGATAAGCTGATCGCCAGAAAGAAGGACTGG
GACCCTAAGAAGTACGGCGGCTTCGACAGCCCCACCGTGGCCTATTCTGTGCTGGTGGTGGC
CAAAGTGGAAAAGGGCAAGTCCAAGAAACTGAAGAGTGTGAAAGAGCTGCTGGGGATCACCA
TCATGGAAAGAAGCAGCTTCGAGAAGAATCCCATCGACTTTCTGGAAGCCAAGGGCTACAAA
GAAGTGAAAAAGGACCTGATCATCAAGCTGCCTAAGTACTCCCTGTTCGAGCTGGAAAACGG
CCGGAAGAGAATGCTGGCCTCTGCCGGCGAACTGCAGAAGGGAAACGAACTGGCCCTGCCCT
CCAAATATGTGAACTTCCTGTACCTGGCCAGCCACTATGAGAAGCTGAAGGGCTCCCCCGAG
GATAATGAGCAGAAACAGCTGTTTGTGGAACAGCACAAGCACTACCTGGACGAGATCATCGA
GCAGATCAGCGAGTTCTCCAAGAGAGTGATCCTGGCCGACGCTAATCTGGACAAAGTGCTGT
CCGCCTACAACAAGCACCGGGATAAGCCCATCAGAGAGCAGGCCGAGAATATCATCCACCTG
TTTACCCTGACCAATCTGGGAGCCCCTGCCGCCTTCAAGTACTTTGACACCACCATCGACCG
GAAGAGGTACACCAGCACCAAAGAGGTGCTGGACGCCACCCTGATCCACCAGAGCATCACCG
GCCTGTACGAGACACGGATCGACCTGTCTCAGCTGGGAGGTGACTCTGGTGGAAGCGGAGGA
TCTGGCGGCAGCACCAATCTGAGCGACATCATCGAGAAAGAGACAGGCAAGCAGCTGGTCAT
CCAAGAGTCCATCCTGATGCTGCCTGAAGAGGTGGAAGAAGTGATCGGCAACAAGCCCGAGT
CCGACATCCTGGTGCACACCGCCTACGATGAGAGCACCGACGAGAACGTGATGCTGCTGACC
TCTGACGCCCCTGAGTACAAGCCTTGGGCTCTCGTGATCCAGGACAGCAACGGCGAGAACAA
GATCAAGATGCTGAGCGGCGGCTCTGGTGGCTCTGGCGGATCTACAAACCTGTCCGATATTA
TTGAGAAAGAAACCGGGAAACAGCTCGTGATTCAAGAGTCTATTCTCATGCTCCCGGAAGAA
GTCGAGGAAGTCATTGGAAACAAGCCTGAGAGCGATATTCTGGTCCATACAGCCTACGACGA
GTCTACCGATGAGAATGTCATGCTCCTCACCAGCGACGCTCCCGAGTATAAGCCATGGGCAC
TTGTCATTCAGGACTCCAATGGGGAAAACAAAATCAAAATGCTCCCAAAGAAAAAACGCAAG
GTGGAGGGAGCTGATAAGCGCACCGCCGATGGTTCCGAGTTCGAAAGCCCCAAGAAGAAGAG
GAAAGTCT
APOBEC1 Pongo pygmaeus (orangutan) replacing rAPOBEC1
MTSEKGPSTGDPTLRRRIESWEFDVFYDPRELRKETCLLYEIKWGMSRKIWRSSGKNTTNHV
EVNFIKKFTSERRFHSSISCSITWFLSWSPCWECSQAIREFLSQHPGVTLVIYVARLFWHMD
QRNRQGLRDLVNSGVTIQIMRASEYYHCWRNFVNYPPGDEAHWPQYPPLWMMLYALELHCII
LSLPPCLKISRRWQNHLAFFRLHLQNCHYQTIPPHILLATGLIHPSVTWRLKSGGSSGGSSG
SETPGTSESATPESSGGSSGGSDKKYSIGLAIGTNSVGWAVITDEYKVPSKKFKVLGNTDRH
SIKKNLIGALLFDSGETAEATRLKRTARRRYTRRKNRICYLQEIFSNEMAKVDDSFFHRLEE
SFLVEEDKKHERHPIFGNIVDEVAYHEKYPTIYHLRKKLVDSTDKADLRLIYLALAHMIKFR
GHFLIEGDLNPDNSDVDKLFIQLVQTYNQLFEENPINASGVDAKAILSARLSKSRRLENLIA
QLPGEKKNGLFGNLIALSLGLTPNFKSNFDLAEDAKLQLSKDTYDDDLDNLLAQIGDQYADL
FLAAKNLSDAILLSDILRVNTEITKAPLSASMIKRYDEHHQDLTLLKALVRQQLPEKYKEIF
FDQSKNGYAGYIDGGASQEEFYKFIKPILEKMDGTEELLVKLNREDLLRKQRTFDNGSIPHQ
IHLGELHAILRRQEDFYPFLKDNREKIEKILTFRIPYYVGPLARGNSRFAWMTRKSEETITP
WNFEEVVDKGASAQSFIERMTNFDKNLPNEKVLPKHSLLYEYFTVYNELTKVKYVTEGMRKP
AFLSGEQKKAIVDLLFKTNRKVTVKQLKEDYFKKIECFDSVEISGVEDRFNASLGTYHDLLK
IIKDKDFLDNEENEDILEDIVLTLTLFEDREMIEERLKTYAHLFDDKVMKQLKRRRYTGWGR
LSRKLINGIRDKQSGKTILDFLKSDGFANRNFMQLIHDDSLTFKEDIQKAQVSGQGDSLHEH
IANLAGSPAIKKGILQTVKVVDELVKVMGRHKPENIVIEMARENQTTQKGQKNSRERMKRIE
EGIKELGSQILKEHPVENTQLQNEKLYLYYLQNGRDMYVDQELDINRLSDYDVDHIVPQSFL
KDDSIDNKVLTRSDKNRGKSDNVPSEEVVKKMKNYWRQLLNAKLITQRKFDNLTKAERGGLS
ELDKAGFIKRQLVETRQITKHVAQILDSRMNTKYDENDKLIREVKVITLKSKLVSDFRKDFQ
FYKVREINNYHHAHDAYLNAVVGTALIKKYPKLESEFVYGDYKVYDVRKMIAKSEQEIGKAT
AKYFFYSNIMNFFKTEITLANGEIRKRPLIETNGETGEIVWDKGRDFATVRKVLSMPQVNIV
KKTEVQTGGFSKESILPKRNSDKLIARKKDWDPKKYGGFDSPTVAYSVLVVAKVEKGKSKKL
KSVKELLGITIMERSSFEKNPIDFLEAKGYKEVKKDLIIKLPKYSLFELENGRKRMLASAGE
LQKGNELALPSKYVNFLYLASHYEKLKGSPEDNEQKQLFVEQHKHYLDEIIEQISEFSKRVI
LADANLDKVLSAYNKHRDKPIREQAENIIHLFTLTNLGAPAAFKYFDTTIDRKRYTSTKEVL
DATLIHQSITGLYETRIDLSQLGGDSGGSGGSGGSTNLSDIIEKETGKQLVIQESILMLPEE
VEEVIGNKPESDILVHTAYDESTDENVMLLTSDAPEYKPWALVIQDSNGENKIKMLSGGSGG
SGGSTNLSDIIEKETGKQLVIQESILMLPEEVEEVIGNKPESDILVHTAYDESTDENVMLLT
SDAPEYKPWALVIQDSNGENKIKMLPKKKRKVEGADKRTADGSEFESPKKKRKV
BGX27-D10A (CMV to SV40 NLS)
CATTGATTATTGACTAGTTATTAATAGTAATCAATTACGGGGTCATTAGTTCATAGCCCATA
TATGGAGTTCCGCGTTACATAACTTACGGTAAATGGCCCGCCTGGCTGACCGCCCAACGACC
CCCGCCCATTGACGTCAATAATGACGTATGTTCCCATAGTAACGCCAATAGGGACTTTCCAT
TGACGTCAATGGGTGGAGTATTTACGGTAAACTGCCCACTTGGCAGTACATCAAGTGTATCA
TATGCCAAGTACGCCCCCTATTGACGTCAATGACGGTAAATGGCCCGCCTGGCATTATGCCC
AGTACATGACCTTATGGGACTTTCCTACTTGGCAGTACATCTACGTATTAGTCATCGCTATT
ACCATGGTGATGCGGTTTTGGCAGTACATCAATGGGCGTGGATAGCGGTTTGACTCACGGGG
ATTTCCAAGTCTCCACCCCATTGACGTCAATGGGAGTTTGTTTTGGCACCAAAATCAACGGG
ACTTTCCAAAATGTCGTAACAACTCCGCCCCATTGACGCAAATGGGCGGTAGGCGTGTACGG
TGGGAGGTCTATATAAGCAGAGCTGGTTTAGTGAACCGTCAGATCCGCTAGAGATCCGCGGC
CGCTAATACGACTCACTATAGGGAGAGCCGCCACCATGGCCGGCTACGAGTGCGTGCGGGTG
TCCGAGAAGCTGGATTTCGATACCTTCGAGTTCCAGTTCGAGAACCTGCACTACGCCACAGA
GAGACACAGAACCTACGTGATCTTCGACGTGAAACCTCAGAGCGCCGGAGGCAGAAGCCGGC
GGCTGTGGGGCTACATCATCAACAACCCCAACGTGTGCCACGCCGAGCTGATCCTGATGAGC
ATGATCGACCGGCACCTGGAATCTAATCCTGGCGTGTACGCCATGACCTGGTACATGAGCTG
GTCCCCATGTGCTAATTGCAGCAGCAAGCTGAACCCTTGGCTGAAAAACCTGCTCGAGGAAC
AGGGCCACACCCTGACCATGCACTTCAGCAGAATCTACGACAGAGATAGAGAAGGCGACCAC
CGAGGACTGAGAGGCCTGAAGCACGTGTCCAACAGCTTCAGAATGGGCGTGGTCGGAAGAGC
CGAGGTGAAGGAATGTCTGGCCGAATACGTGGAAGCCAGCAGAAGAACACTGACATGGCTGG
ACACCACAGAGAGCATGGCCGCCAAGATGCGGAGAAAGCTGTTCTGCATCCTGGTGCGGTGC
GCCGGCATGAGAGAGAGCGGCATCCCCCTGCACCTGTTTACCCTGCAGACCCCTCTGCTGAG
CGGCAGAGTGGTGTGGTGGCGGGTGCTTAAGAGCGGAGGATCTAGCGGCGGCTCTAGCGGAT
CTGAGACACCTGGCACAAGCGAGTCTGCCACACCTGAGAGTAGCGGCGGATCTTCTGGTGGC
TCTGACAAGAAGTACAGCATCGGCCTGGCCATCGGCACCAACTCTGTGGGCTGGGCCGTGAT
CACCGACGAGTACAAGGTGCCCAGCAAGAAATTCAAGGTGCTGGGCAACACCGACCGGCACA
GCATCAAGAAGAACCTGATCGGAGCCCTGCTGTTCGACAGCGGCGAAACAGCCGAGGCCACC
CGGCTGAAGAGAACCGCCAGAAGAAGATACACCAGACGGAAGAACCGGATCTGCTATCTGCA
AGAGATCTTCAGCAACGAGATGGCCAAGGTGGACGACAGCTTCTTCCACAGACTGGAAGAGT
CCTTCCTGGTGGAAGAGGATAAGAAGCACGAGCGGCACCCCATCTTCGGCAACATCGTGGAC
GAGGTGGCCTACCACGAGAAGTACCCCACCATCTACCACCTGAGAAAGAAACTGGTGGACAG
CACCGACAAGGCCGACCTGCGGCTGATCTATCTGGCCCTGGCCCACATGATCAAGTTCCGGG
GCCACTTCCTGATCGAGGGCGACCTGAACCCCGACAACAGCGACGTGGACAAGCTGTTCATC
CAGCTGGTGCAGACCTACAACCAGCTGTTCGAGGAAAACCCCATCAACGCCAGCGGCGTGGA
CGCCAAGGCCATCCTGTCTGCCAGACTGAGCAAGAGCAGACGGCTGGAAAATCTGATCGCCC
AGCTGCCCGGCGAGAAGAAGAATGGCCTGTTCGGAAACCTGATTGCCCTGAGCCTGGGCCTG
ACCCCCAACTTCAAGAGCAACTTCGACCTGGCCGAGGATGCCAAACTGCAGCTGAGCAAGGA
CACCTACGACGACGACCTGGACAACCTGCTGGCCCAGATCGGCGACCAGTACGCCGACCTGT
TTCTGGCCGCCAAGAACCTGTCCGACGCCATCCTGCTGAGCGACATCCTGAGAGTGAACACC
GAGATCACCAAGGCCCCCCTGAGCGCCTCTATGATCAAGAGATACGACGAGCACCACCAGGA
CCTGACCCTGCTGAAAGCTCTCGTGCGGCAGCAGCTGCCTGAGAAGTACAAAGAGATTTTCT
TCGACCAGAGCAAGAACGGCTACGCCGGCTACATTGACGGCGGAGCCAGCCAGGAAGAGTTC
TACAAGTTCATCAAGCCCATCCTGGAAAAGATGGACGGCACCGAGGAACTGCTCGTGAAGCT
GAACAGAGAGGACCTGCTGCGGAAGCAGCGGACCTTCGACAACGGCAGCATCCCCCACCAGA
TCCACCTGGGAGAGCTGCACGCCATTCTGCGGCGGCAGGAAGATTTTTACCCATTCCTGAAG
GACAACCGGGAAAAGATCGAGAAGATCCTGACCTTCCGCATCCCCTACTACGTGGGCCCTCT
GGCCAGGGGAAACAGCAGATTCGCCTGGATGACCAGAAAGAGCGAGGAAACCATCACCCCCT
GGAACTTCGAGGAAGTGGTGGACAAGGGCGCTTCCGCCCAGAGCTTCATCGAGCGGATGACC
AACTTCGATAAGAACCTGCCCAACGAGAAGGTGCTGCCCAAGCACAGCCTGCTGTACGAGTA
CTTCACCGTGTATAACGAGCTGACCAAAGTGAAATACGTGACCGAGGGAATGAGAAAGCCCG
CCTTCCTGAGCGGCGAGCAGAAAAAGGCCATCGTGGACCTGCTGTTCAAGACCAACCGGAAA
GTGACCGTGAAGCAGCTGAAAGAGGACTACTTCAAGAAAATCGAGTGCTTCGACTCCGTGGA
AATCTCCGGCGTGGAAGATCGGTTCAACGCCTCCCTGGGCACATACCACGATCTGCTGAAAA
TTATCAAGGACAAGGACTTCCTGGACAATGAGGAAAACGAGGACATTCTGGAAGATATCGTG
CTGACCCTGACACTGTTTGAGGACAGAGAGATGATCGAGGAACGGCTGAAAACCTATGCCCA
CCTGTTCGACGACAAAGTGATGAAGCAGCTGAAGCGGCGGAGATACACCGGCTGGGGCAGGC
TGAGCCGGAAGCTGATCAACGGCATCCGGGACAAGCAGTCCGGCAAGACAATCCTGGATTTC
CTGAAGTCCGACGGCTTCGCCAACAGAAACTTCATGCAGCTGATCCACGACGACAGCCTGAC
CTTTAAAGAGGACATCCAGAAAGCCCAGGTGTCCGGCCAGGGCGATAGCCTGCACGAGCACA
TTGCCAATCTGGCCGGCAGCCCCGCCATTAAGAAGGGCATCCTGCAGACAGTGAAGGTGGTG
GACGAGCTCGTGAAAGTGATGGGCCGGCACAAGCCCGAGAACATCGTGATCGAAATGGCCAG
AGAGAACCAGACCACCCAGAAGGGACAGAAGAACAGCCGCGAGAGAATGAAGCGGATCGAAG
AGGGCATCAAAGAGCTGGGCAGCCAGATCCTGAAAGAACACCCCGTGGAAAACACCCAGCTG
CAGAACGAGAAGCTGTACCTGTACTACCTGCAGAATGGGCGGGATATGTACGTGGACCAGGA
ACTGGACATCAACCGGCTGTCCGACTACGATGTGGACCATATCGTGCCTCAGAGCTTTCTGA
AGGACGACTCCATCGACAACAAGGTGCTGACCAGAAGCGACAAGAACCGGGGCAAGAGCGAC
AACGTGCCCTCCGAAGAGGTCGTGAAGAAGATGAAGAACTACTGGCGGCAGCTGCTGAACGC
CAAGCTGATTACCCAGAGAAAGTTCGACAATCTGACCAAGGCCGAGAGAGGCGGCCTGAGCG
AACTGGATAAGGCCGGCTTCATCAAGAGACAGCTGGTGGAAACCCGGCAGATCACAAAGCAC
GTGGCACAGATCCTGGACTCCCGGATGAACACTAAGTACGACGAGAATGACAAGCTGATCCG
GGAAGTGAAAGTGATCACCCTGAAGTCCAAGCTGGTGTCCGATTTCCGGAAGGATTTCCAGT
TTTACAAAGTGCGCGAGATCAACAACTACCACCACGCCCACGACGCCTACCTGAACGCCGTC
GTGGGAACCGCCCTGATCAAAAAGTACCCTAAGCTGGAAAGCGAGTTCGTGTACGGCGACTA
CAAGGTGTACGACGTGCGGAAGATGATCGCCAAGAGCGAGCAGGAAATCGGCAAGGCTACCG
CCAAGTACTTCTTCTACAGCAACATCATGAACTTTTTCAAGACCGAGATTACCCTGGCCAAC
GGCGAGATCCGGAAGCGGCCTCTGATCGAGACAAACGGCGAAACCGGGGAGATCGTGTGGGA
TAAGGGCCGGGATTTTGCCACCGTGCGGAAAGTGCTGAGCATGCCCCAAGTGAATATCGTGA
AAAAGACCGAGGTGCAGACAGGCGGCTTCAGCAAAGAGTCTATCCTGCCCAAGAGGAACAGC
GATAAGCTGATCGCCAGAAAGAAGGACTGGGACCCTAAGAAGTACGGCGGCTTCGACAGCCC
CACCGTGGCCTATTCTGTGCTGGTGGTGGCCAAAGTGGAAAAGGGCAAGTCCAAGAAACTGA
AGAGTGTGAAAGAGCTGCTGGGGATCACCATCATGGAAAGAAGCAGCTTCGAGAAGAATCCC
ATCGACTTTCTGGAAGCCAAGGGCTACAAAGAAGTGAAAAAGGACCTGATCATCAAGCTGCC
TAAGTACTCCCTGTTCGAGCTGGAAAACGGCCGGAAGAGAATGCTGGCCTCTGCCGGCGAAC
TGCAGAAGGGAAACGAACTGGCCCTGCCCTCCAAATATGTGAACTTCCTGTACCTGGCCAGC
CACTATGAGAAGCTGAAGGGCTCCCCCGAGGATAATGAGCAGAAACAGCTGTTTGTGGAACA
GCACAAGCACTACCTGGACGAGATCATCGAGCAGATCAGCGAGTTCTCCAAGAGAGTGATCC
TGGCCGACGCTAATCTGGACAAAGTGCTGTCCGCCTACAACAAGCACCGGGATAAGCCCATC
AGAGAGCAGGCCGAGAATATCATCCACCTGTTTACCCTGACCAATCTGGGAGCCCCTGCCGC
CTTCAAGTACTTTGACACCACCATCGACCGGAAGAGGTACACCAGCACCAAAGAGGTGCTGG
ACGCCACCCTGATCCACCAGAGCATCACCGGCCTGTACGAGACACGGATCGACCTGTCTCAG
CTGGGAGGTGACTCTGGTGGAAGCGGAGGATCTGGCGGCAGCACCAATCTGAGCGACATCAT
CGAGAAAGAGACAGGCAAGCAGCTGGTCATCCAAGAGTCCATCCTGATGCTGCCTGAAGAGG
TGGAAGAAGTGATCGGCAACAAGCCCGAGTCCGACATCCTGGTGCACACCGCCTACGATGAG
AGCACCGACGAGAACGTGATGCTGCTGACCTCTGACGCCCCTGAGTACAAGCCTTGGGCTCT
CGTGATCCAGGACAGCAACGGCGAGAACAAGATCAAGATGCTGAGCGGCGGCTCTGGTGGCT
CTGGCGGATCTACAAACCTGTCCGATATTATTGAGAAAGAAACCGGGAAACAGCTCGTGATT
CAAGAGTCTATTCTCATGCTCCCGGAAGAAGTCGAGGAAGTCATTGGAAACAAGCCTGAGAG
CGATATTCTGGTCCATACAGCCTACGACGAGTCTACCGATGAGAATGTCATGCTCCTCACCA
GCGACGCTCCCGAGTATAAGCCATGGGCACTTGTCATTCAGGACTCCAATGGGGAAAACAAA
ATCAAAATGCTCCCAAAGAAAAAACGCAAGGTGGAGGGAGCTGATAAGCGCACCGCCGATGG
TTCCGAGTTCGAAAGCCCCAAGAAGAAGAGGAAAGT
Cytidine deaminase 1 Petromyzon marinus (lamprey) replacing rAPOBEC1
MAGYECVRVSEKLDFDTFEFQFENLHYATERHRTYVIFDVKPQSAGGRSRRLWGYIINNPNV
CHAELILMSMIDRHLESNPGVYAMTWYMSWSPCANCSSKLNPWLKNLLEEQGHTLTMHFSRI
YDRDREGDHRGLRGLKHVSNSFRMGVVGRAEVKECLAEYVEASRRTLTWLDTTESMAAKMRR
KLFCILVRCAGMRESGIPLHLFTLQTPLLSGRVVWWRVLKSGGSSGGSSGSETPGTSESATP
ESSGGSSGGSDKKYSIGLAIGTNSVGWAVITDEYKVPSKKFKVLGNTDRHSIKKNLIGALLF
DSGETAEATRLKRTARRRYTRRKNRICYLQEIFSNEMAKVDDSFFHRLEESFLVEEDKKHER
HPIFGNIVDEVAYHEKYPTIYHLRKKLVDSTDKADLRLIYLALAHMIKFRGHFLIEGDLNPD
NSDVDKLFIQLVQTYNQLFEENPINASGVDAKAILSARLSKSRRLENLIAQLPGEKKNGLFG
NLIALSLGLTPNFKSNFDLAEDAKLQLSKDTYDDDLDNLLAQIGDQYADLFLAAKNLSDAIL
LSDILRVNTEITKAPLSASMIKRYDEHHQDLTLLKALVRQQLPEKYKEIFFDQSKNGYAGYI
DGGASQEEFYKFIKPILEKMDGTEELLVKLNREDLLRKQRTFDNGSIPHQIHLGELHAILRR
QEDFYPFLKDNREKIEKILTFRIPYYVGPLARGNSRFAWMTRKSEETITPWNFEEVVDKGAS
AQSFIERMTNFDKNLPNEKVLPKHSLLYEYFTVYNELTKVKYVTEGMRKPAFLSGEQKKAIV
DLLFKTNRKVTVKQLKEDYFKKIECFDSVEISGVEDRFNASLGTYHDLLKIIKDKDFLDNEE
NEDILEDIVLTLTLFEDREMIEERLKTYAHLFDDKVMKQLKRRRYTGWGRLSRKLINGIRDK
QSGKTILDFLKSDGFANRNFMQLIHDDSLTFKEDIQKAQVSGQGDSLHEHIANLAGSPAIKK
GILQTVKVVDELVKVMGRHKPENIVIEMARENQTTQKGQKNSRERMKRIEEGIKELGSQILK
EHPVENTQLQNEKLYLYYLQNGRDMYVDQELDINRLSDYDVDHIVPQSFLKDDSIDNKVLTR
SDKNRGKSDNVPSEEVVKKMKNYWRQLLNAKLITQRKFDNLTKAERGGLSELDKAGFIKRQL
VETRQITKHVAQILDSRMNTKYDENDKLIREVKVITLKSKLVSDFRKDFQFYKVREINNYHH
AHDAYLNAVVGTALIKKYPKLESEFVYGDYKVYDVRKMIAKSEQEIGKATAKYFFYSNIMNF
FKTEITLANGEIRKRPLIETNGETGEIVWDKGRDFATVRKVLSMPQVNIVKKTEVQTGGFSK
ESILPKRNSDKLIARKKDWDPKKYGGFDSPTVAYSVLVVAKVEKGKSKKLKSVKELLGITIM
ERSSFEKNPIDFLEAKGYKEVKKDLIIKLPKYSLFELENGRKRMLASAGELQKGNELALPSK
YVNFLYLASHYEKLKGSPEDNEQKQLFVEQHKHYLDEIIEQISEFSKRVILADANLDKVLSA
YNKHRDKPIREQAENIIHLFTLTNLGAPAAFKYFDTTIDRKRYTSTKEVLDATLIHQSITGL
YETRIDLSQLGGDSGGSGGSGGSTNLSDIIEKETGKQLVIQESILMLPEEVEEVIGNKPESD
ILVHTAYDESTDENVMLLTSDAPEYKPWALVIQDSNGENKIKMLSGGSGGSGGSTNLSDIIE
KETGKQLVIQESILMLPEEVEEVIGNKPESDILVHTAYDESTDENVMLLTSDAPEYKPWALV
IQDSNGENKIKMLPKKKRKVEGADKRTADGSEFESPKKKRK
BGX29-D10A
CATTGATTATTGACTAGTTATTAATAGTAATCAATTACGGGGTCATTAGTTCATAGCCCATA
TATGGAGTTCCGCGTTACATAACTTACGGTAAATGGCCCGCCTGGCTGACCGCCCAACGACC
CCCGCCCATTGACGTCAATAATGACGTATGTTCCCATAGTAACGCCAATAGGGACTTTCCAT
TGACGTCAATGGGTGGAGTATTTACGGTAAACTGCCCACTTGGCAGTACATCAAGTGTATCA
TATGCCAAGTACGCCCCCTATTGACGTCAATGACGGTAAATGGCCCGCCTGGCATTATGCCC
AGTACATGACCTTATGGGACTTTCCTACTTGGCAGTACATCTACGTATTAGTCATCGCTATT
ACCATGGTGATGCGGTTTTGGCAGTACATCAATGGGCGTGGATAGCGGTTTGACTCACGGGG
ATTTCCAAGTCTCCACCCCATTGACGTCAATGGGAGTTTGTTTTGGCACCAAAATCAACGGG
ACTTTCCAAAATGTCGTAACAACTCCGCCCCATTGACGCAAATGGGCGGTAGGCGTGTACGG
TGGGAGGTCTATATAAGCAGAGCTGGTTTAGTGAACCGTCAGATCCGCTAGAGATCCGCGGC
CGCTAATACGACTCACTATAGGGAGAGCCGCCACCATGGCTGGCGATGAGAACGTGCGGGTG
AGTGAAAAGCTGGACTTCGACACCTTCGAGTTCCAGTTCGAGAATCTGCACTACGCCACCGA
GAGACACCGGACCTACGTGATCTTCGACGTGAAACCTCAGTCTGCCGGCGGCAGAAGCCGGC
GGCTGTGGGGCTACATCATCAACAACCCTAACGTGTGCCACGCCGAGCTGATCCTGATGAGC
ATGATCGACAGACACCTGGAAAGCAACCCCGGCGTGTACGCCATGACCTGGTACATGTCTTG
GTCCCCATGTGCCAACTGCAGCAGCAAGCTGAACCCCTGGCTGAAAAACCTGCTGGAGGAAC
AGGGCCACACCCTGATGATGCACTTCAGCAGAATCTACGACCGGGACCGCGAGGGCGACCAC
AGAGGCCTGAGAGGACTGAAGCACGTGTCCAACAGCTTCAGAATGGGCGTGGTGGGCAGAGC
CGAAGTGAAGGAATGCCTGGCCGAGTACGTGGAAGCCAGCAGAAGAACACTGACCTGGCTGG
ATACAACCGAGAGCATGGCCGCCAAGATGAGAAGGAAGCTGTTCTGCATCCTGGTGCGGTGC
GCCGGCATGCGGGAATCTGGCATGCCTCTGCACCTGTTTACCCTTAAGAGCGGAGGATCTAG
CGGCGGCTCTAGCGGATCTGAGACACCTGGCACAAGCGAGTCTGCCACACCTGAGAGTAGCG
GCGGATCTTCTGGTGGCTCTGACAAGAAGTACAGCATCGGCCTGGCCATCGGCACCAACTCT
GTGGGCTGGGCCGTGATCACCGACGAGTACAAGGTGCCCAGCAAGAAATTCAAGGTGCTGGG
CAACACCGACCGGCACAGCATCAAGAAGAACCTGATCGGAGCCCTGCTGTTCGACAGCGGCG
AAACAGCCGAGGCCACCCGGCTGAAGAGAACCGCCAGAAGAAGATACACCAGACGGAAGAAC
CGGATCTGCTATCTGCAAGAGATCTTCAGCAACGAGATGGCCAAGGTGGACGACAGCTTCTT
CCACAGACTGGAAGAGTCCTTCCTGGTGGAAGAGGATAAGAAGCACGAGCGGCACCCCATCT
TCGGCAACATCGTGGACGAGGTGGCCTACCACGAGAAGTACCCCACCATCTACCACCTGAGA
AAGAAACTGGTGGACAGCACCGACAAGGCCGACCTGCGGCTGATCTATCTGGCCCTGGCCCA
CATGATCAAGTTCCGGGGCCACTTCCTGATCGAGGGCGACCTGAACCCCGACAACAGCGACG
TGGACAAGCTGTTCATCCAGCTGGTGCAGACCTACAACCAGCTGTTCGAGGAAAACCCCATC
AACGCCAGCGGCGTGGACGCCAAGGCCATCCTGTCTGCCAGACTGAGCAAGAGCAGACGGCT
GGAAAATCTGATCGCCCAGCTGCCCGGCGAGAAGAAGAATGGCCTGTTCGGAAACCTGATTG
CCCTGAGCCTGGGCCTGACCCCCAACTTCAAGAGCAACTTCGACCTGGCCGAGGATGCCAAA
CTGCAGCTGAGCAAGGACACCTACGACGACGACCTGGACAACCTGCTGGCCCAGATCGGCGA
CCAGTACGCCGACCTGTTTCTGGCCGCCAAGAACCTGTCCGACGCCATCCTGCTGAGCGACA
TCCTGAGAGTGAACACCGAGATCACCAAGGCCCCCCTGAGCGCCTCTATGATCAAGAGATAC
GACGAGCACCACCAGGACCTGACCCTGCTGAAAGCTCTCGTGCGGCAGCAGCTGCCTGAGAA
GTACAAAGAGATTTTCTTCGACCAGAGCAAGAACGGCTACGCCGGCTACATTGACGGCGGAG
CCAGCCAGGAAGAGTTCTACAAGTTCATCAAGCCCATCCTGGAAAAGATGGACGGCACCGAG
GAACTGCTCGTGAAGCTGAACAGAGAGGACCTGCTGCGGAAGCAGCGGACCTTCGACAACGG
CAGCATCCCCCACCAGATCCACCTGGGAGAGCTGCACGCCATTCTGCGGCGGCAGGAAGATT
TTTACCCATTCCTGAAGGACAACCGGGAAAAGATCGAGAAGATCCTGACCTTCCGCATCCCC
TACTACGTGGGCCCTCTGGCCAGGGGAAACAGCAGATTCGCCTGGATGACCAGAAAGAGCGA
GGAAACCATCACCCCCTGGAACTTCGAGGAAGTGGTGGACAAGGGCGCTTCCGCCCAGAGCT
TCATCGAGCGGATGACCAACTTCGATAAGAACCTGCCCAACGAGAAGGTGCTGCCCAAGCAC
AGCCTGCTGTACGAGTACTTCACCGTGTATAACGAGCTGACCAAAGTGAAATACGTGACCGA
GGGAATGAGAAAGCCCGCCTTCCTGAGCGGCGAGCAGAAAAAGGCCATCGTGGACCTGCTGT
TCAAGACCAACCGGAAAGTGACCGTGAAGCAGCTGAAAGAGGACTACTTCAAGAAAATCGAG
TGCTTCGACTCCGTGGAAATCTCCGGCGTGGAAGATCGGTTCAACGCCTCCCTGGGCACATA
CCACGATCTGCTGAAAATTATCAAGGACAAGGACTTCCTGGACAATGAGGAAAACGAGGACA
TTCTGGAAGATATCGTGCTGACCCTGACACTGTTTGAGGACAGAGAGATGATCGAGGAACGG
CTGAAAACCTATGCCCACCTGTTCGACGACAAAGTGATGAAGCAGCTGAAGCGGCGGAGATA
CACCGGCTGGGGCAGGCTGAGCCGGAAGCTGATCAACGGCATCCGGGACAAGCAGTCCGGCA
AGACAATCCTGGATTTCCTGAAGTCCGACGGCTTCGCCAACAGAAACTTCATGCAGCTGATC
CACGACGACAGCCTGACCTTTAAAGAGGACATCCAGAAAGCCCAGGTGTCCGGCCAGGGCGA
TAGCCTGCACGAGCACATTGCCAATCTGGCCGGCAGCCCCGCCATTAAGAAGGGCATCCTGC
AGACAGTGAAGGTGGTGGACGAGCTCGTGAAAGTGATGGGCCGGCACAAGCCCGAGAACATC
GTGATCGAAATGGCCAGAGAGAACCAGACCACCCAGAAGGGACAGAAGAACAGCCGCGAGAG
AATGAAGCGGATCGAAGAGGGCATCAAAGAGCTGGGCAGCCAGATCCTGAAAGAACACCCCG
TGGAAAACACCCAGCTGCAGAACGAGAAGCTGTACCTGTACTACCTGCAGAATGGGCGGGAT
ATGTACGTGGACCAGGAACTGGACATCAACCGGCTGTCCGACTACGATGTGGACCATATCGT
GCCTCAGAGCTTTCTGAAGGACGACTCCATCGACAACAAGGTGCTGACCAGAAGCGACAAGA
ACCGGGGCAAGAGCGACAACGTGCCCTCCGAAGAGGTCGTGAAGAAGATGAAGAACTACTGG
CGGCAGCTGCTGAACGCCAAGCTGATTACCCAGAGAAAGTTCGACAATCTGACCAAGGCCGA
GAGAGGCGGCCTGAGCGAACTGGATAAGGCCGGCTTCATCAAGAGACAGCTGGTGGAAACCC
GGCAGATCACAAAGCACGTGGCACAGATCCTGGACTCCCGGATGAACACTAAGTACGACGAG
AATGACAAGCTGATCCGGGAAGTGAAAGTGATCACCCTGAAGTCCAAGCTGGTGTCCGATTT
CCGGAAGGATTTCCAGTTTTACAAAGTGCGCGAGATCAACAACTACCACCACGCCCACGACG
CCTACCTGAACGCCGTCGTGGGAACCGCCCTGATCAAAAAGTACCCTAAGCTGGAAAGCGAG
TTCGTGTACGGCGACTACAAGGTGTACGACGTGCGGAAGATGATCGCCAAGAGCGAGCAGGA
AATCGGCAAGGCTACCGCCAAGTACTTCTTCTACAGCAACATCATGAACTTTTTCAAGACCG
AGATTACCCTGGCCAACGGCGAGATCCGGAAGCGGCCTCTGATCGAGACAAACGGCGAAACC
GGGGAGATCGTGTGGGATAAGGGCCGGGATTTTGCCACCGTGCGGAAAGTGCTGAGCATGCC
CCAAGTGAATATCGTGAAAAAGACCGAGGTGCAGACAGGCGGCTTCAGCAAAGAGTCTATCC
TGCCCAAGAGGAACAGCGATAAGCTGATCGCCAGAAAGAAGGACTGGGACCCTAAGAAGTAC
GGCGGCTTCGACAGCCCCACCGTGGCCTATTCTGTGCTGGTGGTGGCCAAAGTGGAAAAGGG
CAAGTCCAAGAAACTGAAGAGTGTGAAAGAGCTGCTGGGGATCACCATCATGGAAAGAAGCA
GCTTCGAGAAGAATCCCATCGACTTTCTGGAAGCCAAGGGCTACAAAGAAGTGAAAAAGGAC
CTGATCATCAAGCTGCCTAAGTACTCCCTGTTCGAGCTGGAAAACGGCCGGAAGAGAATGCT
GGCCTCTGCCGGCGAACTGCAGAAGGGAAACGAACTGGCCCTGCCCTCCAAATATGTGAACT
TCCTGTACCTGGCCAGCCACTATGAGAAGCTGAAGGGCTCCCCCGAGGATAATGAGCAGAAA
CAGCTGTTTGTGGAACAGCACAAGCACTACCTGGACGAGATCATCGAGCAGATCAGCGAGTT
CTCCAAGAGAGTGATCCTGGCCGACGCTAATCTGGACAAAGTGCTGTCCGCCTACAACAAGC
ACCGGGATAAGCCCATCAGAGAGCAGGCCGAGAATATCATCCACCTGTTTACCCTGACCAAT
CTGGGAGCCCCTGCCGCCTTCAAGTACTTTGACACCACCATCGACCGGAAGAGGTACACCAG
CACCAAAGAGGTGCTGGACGCCACCCTGATCCACCAGAGCATCACCGGCCTGTACGAGACAC
GGATCGACCTGTCTCAGCTGGGAGGTGACACCAATCTGAGCGACATCATCGAGAAAGAGACA
GGCAAGCAGCTGGTCATCCAAGAGTCCATCCTGATGCTGCCTGAAGAGGTGGAAGAAGTGAT
CGGCAACAAGCCCGAGTCCGACATCCTGGTGCACACCGCCTACGATGAGAGCACCGACGAGA
ACGTGATGCTGCTGACCTCTGACGCCCCTGAGTACAAGCCTTGGGCTCTCGTGATCCAGGAC
AGCAACGGCGAGAACAAGATCAAGATGCTGAGCGGCGGCTCTGGTGGCTCTGGCGGATCTAC
AAACCTGTCCGATATTATTGAGAAAGAAACCGGGAAACAGCTCGTGATTCAAGAGTCTATTC
TCATGCTCCCGGAAGAAGTCGAGGAAGTCATTGGAAACAAGCCTGAGAGCGATATTCTGGTC
CATACAGCCTACGACGAGTCTACCGATGAGAATGTCATGCTCCTCACCAGCGACGCTCCCGA
GTATAAGCCATGGGCACTTGTCATTCAGGACTCCAATGGGGAAAACAAAATCAAAATGCTCC
CAAAGAAAAAACGCAAGGTGGAGGGAGCTGATAAGCGCACCGCCGATGGTTCCGAGTTCGAA
AGCCCCAAGAAGAAGAGGAAAGTCTAACC
Cytidine deaminase 5 Petromyzon marinus (lamprey) replacing rAPOBEC1
MAGDENVRVSEKLDFDTFEFQFENLHYATERHRTYVIFDVKPQSAGGRSRRLWGYIINNPNV
CHAELILMSMIDRHLESNPGVYAMTWYMSWSPCANCSSKLNPWLKNLLEEQGHTLMMHFSRI
YDRDREGDHRGLRGLKHVSNSFRMGVVGRAEVKECLAEYVEASRRTLTWLDTTESMAAKMRR
KLFCILVRCAGMRESGMPLHLFTLKSGGSSGGSSGSETPGTSESATPESSGGSSGGSDKKYS
IGLAIGTNSVGWAVITDEYKVPSKKFKVLGNTDRHSIKKNLIGALLFDSGETAEATRLKRTA
RRRYTRRKNRICYLQEIFSNEMAKVDDSFFHRLEESFLVEEDKKHERHPIFGNIVDEVAYHE
KYPTIYHLRKKLVDSTDKADLRLIYLALAHMIKFRGHFLIEGDLNPDNSDVDKLFIQLVQTY
NQLFEENPINASGVDAKAILSARLSKSRRLENLIAQLPGEKKNGLFGNLIALSLGLTPNFKS
NFDLAEDAKLQLSKDTYDDDLDNLLAQIGDQYADLFLAAKNLSDAILLSDILRVNTEITKAP
LSASMIKRYDEHHQDLTLLKALVRQQLPEKYKEIFFDQSKNGYAGYIDGGASQEEFYKFIKP
ILEKMDGTEELLVKLNREDLLRKQRTFDNGSIPHQIHLGELHAILRRQEDFYPFLKDNREKI
EKILTFRIPYYVGPLARGNSRFAWMTRKSEETITPWNFEEVVDKGASAQSFIERMTNFDKNL
PNEKVLPKHSLLYEYFTVYNELTKVKYVTEGMRKPAFLSGEQKKAIVDLLFKTNRKVTVKQL
KEDYFKKIECFDSVEISGVEDRFNASLGTYHDLLKIIKDKDFLDNEENEDILEDIVLTLTLF
EDREMIEERLKTYAHLFDDKVMKQLKRRRYTGWGRLSRKLINGIRDKQSGKTILDFLKSDGF
ANRNFMQLIHDDSLTFKEDIQKAQVSGQGDSLHEHIANLAGSPAIKKGILQTVKVVDELVKV
MGRHKPENIVIEMARENQTTQKGQKNSRERMKRIEEGIKELGSQILKEHPVENTQLQNEKLY
LYYLQNGRDMYVDQELDINRLSDYDVDHIVPQSFLKDDSIDNKVLTRSDKNRGKSDNVPSEE
VVKKMKNYWRQLLNAKLITQRKFDNLTKAERGGLSELDKAGFIKRQLVETRQITKHVAQILD
SRMNTKYDENDKLIREVKVITLKSKLVSDFRKDFQFYKVREINNYHHAHDAYLNAVVGTALI
KKYPKLESEFVYGDYKVYDVRKMIAKSEQEIGKATAKYFFYSNIMNFFKTEITLANGEIRKR
PLIETNGETGEIVWDKGRDFATVRKVLSMPQVNIVKKTEVQTGGFSKESILPKRNSDKLIAR
KKDWDPKKYGGFDSPTVAYSVLVVAKVEKGKSKKLKSVKELLGITIMERSSFEKNPIDFLEA
KGYKEVKKDLIIKLPKYSLFELENGRKRMLASAGELQKGNELALPSKYVNFLYLASHYEKLK
GSPEDNEQKQLFVEQHKHYLDEIIEQISEFSKRVILADANLDKVLSAYNKHRDKPIREQAEN
IIHLFTLTNLGAPAAFKYFDTTIDRKRYTSTKEVLDATLIHQSITGLYETRIDLSQLGGDTN
LSDIIEKETGKQLVIQESILMLPEEVEEVIGNKPESDILVHTAYDESTDENVMLLTSDAPEY
KPWALVIQDSNGENKIKMLSGGSGGSGGSTNLSDIIEKETGKQLVIQESILMLPEEVEEVIG
NKPESDILVHTAYDESTDENVMLLTSDAPEYKPWALVIQDSNGENKIKMLPKKKRKVEGADK
RTADGSEFESPKKKRK
BTX 448 (CMV-NLS)
TTGATTATTGACTAGTTATTAATAGTAATCAATTACGGGGTCATTAGTTCATAGCCCATATA
TGGAGTTCCGCGTTACATAACTTACGGTAAATGGCCCGCCTGGCTGACCGCCCAACGACCCC
CGCCCATTGACGTCAATAATGACGTATGTTCCCATAGTAACGCCAATAGGGACTTTCCATTG
ACGTCAATGGGTGGAGTATTTACGGTAAACTGCCCACTTGGCAGTACATCAAGTGTATCATA
TGCCAAGTACGCCCCCTATTGACGTCAATGACGGTAAATGGCCCGCCTGGCATTATGCCCAG
TACATGACCTTATGGGACTTTCCTACTTGGCAGTACATCTACGTATTAGTCATCGCTATTAC
CATGGTGATGCGGTTTTGGCAGTACATCAATGGGCGTGGATAGCGGTTTGACTCACGGGGAT
TTCCAAGTCTCCACCCCATTGACGTCAATGGGAGTTTGTTTTGGCACCAAAATCAACGGGAC
TTTCCAAAATGTCGTAACAACTCCGCCCCATTGACGCAAATGGGCGGTAGGCGTGTACGGTG
GGAGGTCTATATAAGCAGAGCTGGTTTAGTGAACCGTCAGATCCGCTAGAGATCCGCGGCCG
CTAATACGACTCACTATAGGGAGAGCCGCCACCATGAGCAGCGAGACAGGCCCTGTGGCTGT
GGATCCTACACTGCGGAGAAGAATCGAGCCCCACGAGTTCGAGGTGTTCTTCGACCCCAGAG
AGCTGCGGAAAGAGACATGCCTGCTGTACGAGATCAACTGGGGCGGCAGACACTCTATCTGG
CGGCACACAAGCCAGAACACCAACAAGCACGTGGAAGTGAACTTTATCGAGAAGTTTACGAC
CGAGCGGTACTTCTGCCCCAACACCAGATGCAGCATCACCTGGTTTCTGAGCTGGTCCCCTT
GCGGCGAGTGCAGCAGAGCCATCACCGAGTTTCTGTCCAGATATCCCCACGTGACCCTGTTC
ATCTATATCGCCCGGCTGTACCACCACGCCGATCCTAGAAATAGACAGGGACTGCGCGACCT
GATCAGCAGCGGAGTGACCATCCAGATCATGACCGAGCAAGAGAGCGGCTACTGCTGGCGGA
ACTTCGTGAACTACAGCCCCAGCAACGAAGCCCACTGGCCTAGATATCCTCACCTGTGGGTC
CGACTGTACGTGCTGGAACTGTACTGCATCATCCTGGGCCTGCCTCCATGCCTGAACATCCT
GAGAAGAAAGCAGCCTCAGCTGACCTTCTTCACAATCGCCCTGCAGAGCTGCCACTACCAGA
GACTGCCTCCACACATCCTGTGGGCCACCGGACTTAAGAGCGGAGGATCTAGCGGCGGCTCT
AGCGGATCTGAGACACCTGGCACAAGCGAGTCTGCCACACCTGAGAGTAGCGGCGGATCTTC
TGGCGGCTCCGACAAGAAGTACTCTATCGGACTGGCCATCGGCACCAACTCTGTTGGATGGG
CCGTGATCACCGACGAGTACAAGGTGCCCAGCAAGAAATTCAAGGTGCTGGGCAACACCGAC
CGGCACAGCATCAAGAAGAATCTGATCGGCGCCCTGCTGTTCGACTCTGGCGAAACAGCCGA
AGCCACCAGACTGAAGAGAACCGCCAGGCGGAGATACACCCGGCGGAAGAACCGGATCTGCT
ACCTGCAAGAGATCTTCAGCAACGAGATGGCCAAGGTGGACGACAGCTTCTTCCACAGACTG
GAAGAGTCCTTCCTGGTGGAAGAGGACAAGAAGCACGAGCGGCACCCCATCTTCGGCAACAT
CGTGGATGAGGTGGCCTACCACGAGAAGTACCCCACCATCTACCACCTGAGAAAGAAACTGG
TGGACAGCACCGACAAGGCCGACCTGAGACTGATCTACCTGGCTCTGGCCCACATGATCAAG
TTCCGGGGCCACTTTCTGATCGAGGGCGATCTGAACCCCGACAACAGCGACGTGGACAAGCT
GTTCATCCAGCTGGTGCAGACCTACAACCAGCTGTTCGAGGAAAACCCCATCAACGCCTCTG
GCGTGGACGCCAAGGCTATCCTGTCTGCCAGACTGAGCAAGAGCAGAAGGCTGGAAAACCTG
ATCGCCCAGCTGCCTGGCGAGAAGAAGAATGGCCTGTTCGGCAACCTGATTGCCCTGAGCCT
GGGACTGACCCCTAACTTCAAGAGCAACTTCGACCTGGCCGAGGATGCCAAACTGCAGCTGA
GCAAGGACACCTACGACGACGACCTGGACAATCTGCTGGCCCAGATCGGCGATCAGTACGCC
GACTTGTTTCTGGCCGCCAAGAACCTGTCCGACGCCATCCTGCTGAGCGATATCCTGAGAGT
GAACACCGAGATCACAAAGGCCCCTCTGAGCGCCTCTATGATCAAGAGATACGACGAGCACC
ACCAGGATCTGACCCTGCTGAAGGCCCTCGTTAGACAGCAGCTGCCAGAGAAGTACAAAGAG
ATTTTCTTCGATCAGTCCAAGAACGGCTACGCCGGCTACATTGATGGCGGAGCCAGCCAAGA
GGAATTCTACAAGTTCATCAAGCCCATCCTGGAAAAGATGGACGGCACCGAGGAACTGCTGG
TCAAGCTGAACAGAGAGGACCTGCTGCGGAAGCAGCGGACCTTCGACAATGGCTCTATCCCT
CACCAGATCCACCTGGGAGAGCTGCACGCCATTCTGCGGAGACAAGAGGACTTTTACCCATT
CCTGAAGGACAACCGGGAAAAGATCGAGAAGATCCTGACCTTCAGGATCCCCTACTACGTGG
GACCACTGGCCAGAGGCAATAGCAGATTCGCCTGGATGACCAGAAAGAGCGAGGAAACCATC
ACACCCTGGAACTTCGAGGAAGTGGTGGACAAGGGCGCCAGCGCTCAGTCCTTCATCGAGCG
GATGACCAACTTCGATAAGAACCTGCCTAACGAGAAGGTGCTGCCCAAGCACTCCCTGCTGT
ATGAGTACTTCACCGTGTACAACGAGCTGACCAAAGTGAAATACGTGACCGAGGGAATGAGA
AAGCCCGCCTTTCTGAGCGGCGAGCAGAAAAAGGCCATTGTGGATCTGCTGTTCAAGACCAA
CCGGAAAGTGACCGTGAAGCAGCTGAAAGAGGACTACTTCAAGAAAATCGAGTGCTTCGACA
GCGTGGAAATCAGCGGCGTGGAAGATCGGTTCAATGCCAGCCTGGGCACATACCACGACCTG
CTGAAAATTATCAAGGACAAGGACTTCCTGGACAACGAAGAGAACGAGGACATTCTCGAGGA
CATCGTGCTGACCCTGACACTGTTTGAGGACAGAGAGATGATCGAGGAACGGCTGAAAACAT
ACGCCCACCTGTTCGACGACAAAGTGATGAAGCAACTGAAGCGGAGGCGGTACACAGGCTGG
GGCAGACTGTCTCGGAAGCTGATCAACGGCATCCGGGATAAGCAGTCCGGCAAGACAATCCT
GGATTTCCTGAAGTCCGACGGCTTCGCCAACAGAAACTTCATGCAGCTGATCCACGACGACA
GCCTGACCTTTAAAGAGGACATCCAGAAAGCCCAGGTGTCCGGCCAAGGCGATTCTCTGCAC
GAGCACATTGCCAACCTGGCCGGATCTCCCGCCATTAAGAAGGGCATCCTGCAGACAGTGAA
GGTGGTGGACGAGCTTGTGAAAGTGATGGGCAGACACAAGCCCGAGAACATCGTGATCGAAA
TGGCCAGAGAGAACCAGACCACACAGAAGGGCCAGAAGAACAGCCGCGAGAGAATGAAGCGG
ATCGAAGAGGGCATCAAAGAGCTGGGCAGCCAGATCCTGAAAGAACACCCCGTGGAAAACAC
CCAGCTGCAGAACGAGAAGCTGTACCTGTACTACCTGCAGAATGGACGGGATATGTACGTGG
ACCAAGAGCTGGACATCAACCGGCTGAGCGACTACGATGTGGACCATATCGTGCCCCAGAGC
TTTCTGAAGGACGACTCCATCGATAACAAGGTCCTGACCAGAAGCGACAAGAACCGGGGCAA
GAGCGATAACGTGCCCTCCGAAGAGGTGGTCAAGAAGATGAAGAACTACTGGCGACAGCTGC
TGAACGCCAAGCTGATTACCCAGCGGAAGTTCGATAACCTGACCAAGGCCGAGAGAGGCGGC
CTGAGCGAACTTGATAAGGCCGGCTTCATTAAGCGGCAGCTGGTGGAAACCCGGCAGATCAC
CAAACACGTGGCACAGATTCTGGACTCCCGGATGAACACTAAGTACGACGAGAATGACAAGC
TGATCCGGGAAGTGAAAGTCATCACCCTGAAGTCTAAGCTGGTGTCCGATTTCCGGAAGGAT
TTCCAGTTCTACAAAGTGCGGGAAATCAACAACTACCATCACGCCCACGACGCCTACCTGAA
TGCCGTTGTTGGAACAGCCCTGATCAAGAAGTATCCCAAGCTGGAAAGCGAGTTCGTGTACG
GCGACTACAAGGTGTACGACGTGCGGAAGATGATCGCCAAGAGCGAACAAGAGATCGGCAAG
GCTACCGCCAAGTACTTTTTCTACAGCAACATCATGAACTTTTTCAAGACAGAGATCACCCT
GGCCAACGGCGAGATCCGGAAAAGACCCCTGATCGAGACAAACGGCGAAACCGGGGAGATCG
TGTGGGATAAGGGCAGAGATTTTGCCACAGTGCGGAAAGTGCTGAGCATGCCCCAAGTGAAT
ATCGTGAAGAAAACCGAGGTGCAGACAGGCGGCTTCAGCAAAGAGTCTATCCTGCCTAAGCG
GAACAGCGATAAGCTGATCGCCAGAAAGAAGGACTGGGACCCTAAGAAGTACGGCGGCTTCG
ATAGCCCTACCGTGGCCTATTCTGTGCTGGTGGTGGCCAAAGTGGAAAAGGGCAAGTCCAAA
AAGCTCAAGAGCGTGAAAGAGCTGCTGGGGATCACCATCATGGAAAGAAGCAGCTTTGAGAA
GAACCCGATCGACTTTCTGGAAGCCAAGGGCTACAAAGAAGTCAAGAAGGACCTCATCATCA
AGCTCCCCAAGTACAGCCTGTTCGAGCTGGAAAATGGCCGGAAGCGGATGCTGGCCTCAGCA
GGCGAACTGCAGAAAGGCAATGAACTGGCCCTGCCTAGCAAATACGTCAACTTCCTGTACCT
GGCCAGCCACTATGAGAAGCTGAAGGGCAGCCCCGAGGACAATGAGCAAAAGCAGCTGTTTG
TGGAACAGCACAAGCACTACCTGGACGAGATCATCGAGCAGATCAGCGAGTTCTCCAAGAGA
GTGATCCTGGCCGACGCTAACCTGGATAAGGTGCTGTCTGCCTATAACAAGCACCGGGACAA
GCCTATCAGAGAGCAGGCCGAGAATATCATCCACCTGTTTACCCTGACCAACCTGGGAGCCC
CTGCCGCCTTCAAGTACTTCGACACCACCATCGACCGGAAGAGGTACACCAGCACCAAAGAG
GTGCTGGACGCCACACTGATCCACCAGTCTATCACCGGCCTGTACGAAACCCGGATCGACCT
GTCTCAGCTCGGCGGCGATTCTGGTGGTTCTGGCGGAAGTGGCGGATCCACCAATCTGAGCG
ACATCATCGAAAAAGAGACAGGCAAGCAGCTCGTGATCCAAGAATCCATCCTGATGCTGCCT
GAAGAGGTTGAGGAAGTGATCGGCAACAAGCCTGAGTCCGACATCCTGGTGCACACCGCCTA
CGATGAGAGCACCGATGAGAACGTCATGCTGCTGACAAGCGACGCCCCTGAGTACAAGCCTT
GGGCTCTCGTGATTCAGGACAGCAATGGGGAGAACAAGATCAAGATGCTGAGCGGAGGTAGC
GGAGGCAGTGGCGGAAGCACAAACCTGTCTGATATCATTGAAAAAGAAACCGGGAAGCAACT
GGTCATTCAAGAGTCCATTCTCATGCTCCCGGAAGAAGTCGAGGAAGTCATTGGAAACAAAC
CCGAGAGCGATATTCTGGTCCACACAGCCTATGACGAGTCTACAGACGAAAACGTGATGCTC
CTGACCTCTGACGCTCCCGAGTATAAGCCCTGGGCACTTGTTATCCAGGACTCTAACGGGGA
AAACAAAATCAAAATGTTGTCCGGCGGCAGCAAGCGGACAGCCGATGGATCTGAGTTCGAGA
GCCCCAAGAAGAAACGGAAGGTGGAGTGACCGGTCATC
APOBEC1 (Rat)
MSSETGPVAVDPTLRRRIEPHEFEVFFDPRELRKETCLLYEINWGGRHSIWRHTSQNTNKHV
EVNFIEKFTTERYFCPNTRCSITWFLSWSPCGECSRAITEFLSRYPHVTLFIYIARLYHHAD
PRNRQGLRDLISSGVTIQIMTEQESGYCWRNFVNYSPSNEAHWPRYPHLWVRLYVLELYCII
LGLPPCLNILRRKQPQLTFFTIALQSCHYQRLPPHILWATGLKSGGSSGGSSGSETPGTSES
ATPESSGGSSGGSDKKYSIGLAIGTNSVGWAVITDEYKVPSKKFKVLGNTDRHSIKKNLIGA
LLFDSGETAEATRLKRTARRRYTRRKNRICYLQEIFSNEMAKVDDSFFHRLEESFLVEEDKK
HERHPIFGNIVDEVAYHEKYPTIYHLRKKLVDSTDKADLRLIYLALAHMIKFRGHFLIEGDL
NPDNSDVDKLFIQLVQTYNQLFEENPINASGVDAKAILSARLSKSRRLENLIAQLPGEKKNG
LFGNLIALSLGLTPNFKSNFDLAEDAKLQLSKDTYDDDLDNLLAQIGDQYADLFLAAKNLSD
AILLSDILRVNTEITKAPLSASMIKRYDEHHQDLTLLKALVRQQLPEKYKEIFFDQSKNGYA
GYIDGGASQEEFYKFIKPILEKMDGTEELLVKLNREDLLRKQRTFDNGSIPHQIHLGELHAI
LRRQEDFYPFLKDNREKIEKILTFRIPYYVGPLARGNSRFAWMTRKSEETITPWNFEEVVDK
GASAQSFIERMTNFDKNLPNEKVLPKHSLLYEYFTVYNELTKVKYVTEGMRKPAFLSGEQKK
AIVDLLFKTNRKVTVKQLKEDYFKKIECFDSVEISGVEDRFNASLGTYHDLLKIIKDKDFLD
NEENEDILEDIVLTLTLFEDREMIEERLKTYAHLFDDKVMKQLKRRRYTGWGRLSRKLINGI
RDKQSGKTILDFLKSDGFANRNFMQLIHDDSLTFKEDIQKAQVSGQGDSLHEHIANLAGSPA
IKKGILQTVKVVDELVKVMGRHKPENIVIEMARENQTTQKGQKNSRERMKRIEEGIKELGSQ
ILKEHPVENTQLQNEKLYLYYLQNGRDMYVDQELDINRLSDYDVDHIVPQSFLKDDSIDNKV
LTRSDKNRGKSDNVPSEEVVKKMKNYWRQLLNAKLITQRKFDNLTKAERGGLSELDKAGFIK
RQLVETRQITKHVAQILDSRMNTKYDENDKLIREVKVITLKSKLVSDFRKDFQFYKVREINN
YHHAHDAYLNAVVGTALIKKYPKLESEFVYGDYKVYDVRKMIAKSEQEIGKATAKYFFYSNI
MNFFKTEITLANGEIRKRPLIETNGETGEIVWDKGRDFATVRKVLSMPQVNIVKKTEVQTGG
FSKESILPKRNSDKLIARKKDWDPKKYGGFDSPTVAYSVLVVAKVEKGKSKKLKSVKELLGI
TIMERSSFEKNPIDFLEAKGYKEVKKDLIIKLPKYSLFELENGRKRMLASAGELQKGNELAL
PSKYVNFLYLASHYEKLKGSPEDNEQKQLFVEQHKHYLDEIIEQISEFSKRVILADANLDKV
LSAYNKHRDKPIREQAENIIHLFTLTNLGAPAAFKYFDTTIDRKRYTSTKEVLDATLIHQSI
TGLYETRIDLSQLGGDSGGSGGSGGSTNLSDIIEKETGKQLVIQESILMLPEEVEEVIGNKP
ESDILVHTAYDESTDENVMLLTSDAPEYKPWALVIQDSNGENKIKMLSGGSGGSGGSTNLSD
IIEKETGKQLVIQESILMLPEEVEEVIGNKPESDILVHTAYDESTDENVMLLTSDAPEYKPW
ALVIQDSNGENKIKMLSGGSKRTADGSEFESPKKKRK

[1129] Base editor BGX5-D A includes orangutan APOBEC, spCas9D10A, a CMV promoter and an SV4C NLS. BGX27-D1SA includes pmCDA1 cytidine deaminase, spCas9D10A, a CMV promoter and an SV40 NLS. BGX29-D10A includes pmCDA5, spCas9D10A, a CMV promoter and an SV40 NLS. BTX 448 includes rApobec1, spCas9D10A, a CMV promoter and an SV40 NLS.

[1130] If desired, rAPOBEC1 is replaced by APOBEC1 Pongo pygmaeus, by Cytidine deaminase 1 Petromyzon marinus (lamprey), or Cytidine deaminase 5 Petromyzon marinus (lamprey).

[1131] Cytidine deaminases that could be used in the C-to-T base editor include, for example, any of the following:

rAPOBEC-1 Rattus norvegicus
[sequence omitted]
mAPOBEC-1 Mus musculus
MSSETGPVAVDPTLRRRIEPHEFEVFFDPRELRKETCLLYEINWGGRHSVWRHTSQNTSNHV
EVNFLEKFTTERYFRPNTRCSITWFLSWSPCGECSRAITEFLSRHPYVTLFIYIARLYHHTD
QRNRQGLRDLISSGVTIQIMTEQEYCYCWRNFVNYPPSNEAYWPRYPHLWVKLYVLELYCII
LGLPPCLKILRRKQPQLTFFTITLQTCHYQRIPPHLLWATGLK
maAPOBEC-1 Mesocricetus auratus
MSSETGPVVVDPTLRRRIEPHEFDAFFDQGELRKETCLLYEIRWGGRHNIWRHTGQNTSRHV
EINFIEKFTSERYFYPSTRCSIVWFLSWSPCGECSKAITEFLSGHPNVTLFIYAARLYHHTD
QRNRQGLRDLISRGVTIRIMTEQEYCYCWRNFVNYPPSNEVYWPRYPNLWMRLYALELYCIH
LGLPPCLKIKRRHQYPLTFFRLNLQSCHYQRIPPHILWATGFI
hAPOBEC-1 Homo sapiens
MTSEKGPSTGDPTLRRRIEPWEFDVFYDPRELRKEACLLYEIKWGMSRKIWRSSGKNTTNHV
EVNFIKKFTSERDFHPSMSCSITWFLSWSPCWECSQAIREFLSRHPGVTLVIYVARLFWHMD
QQNRQGLRDLVNSGVTIQIMRASEYYHCWRNFVNYPPGDEAHWPQYPPLWMMLYALELHCII
LSLPPCLKISRRWQNHLTFFRLHLQNCHYQTIPPHILLATGLIHPSVAWR
ppAP OBEC-1 Pongo pygmaeus
MTSEKGPSTGDPTLRRRIESWEFDVFYDPRELRKETCLLYEIKWGMSRKIWRSSGKNTTNHV
EVNFIKKFTSERRFHSSISCSITWFLSWSPCWECSQAIREFLSQHPGVTLVIYVARLFWHMD
QRNRQGLRDLVNSGVTIQIMRASEYYHCWRNFVNYPPGDEAHWPQYPPLWMMLYALELHCII
LSLPPCLKISRRWQNHLAFFRLHLQNCHYQTIPPHILLATGLIHPSVTWR
ocAPOBEC 1 Oryctolagus cuniculus
MASEKGPSNKDYTLRRRIEPWEFEVFFDPQELRKEACLLYEIKWGASSKTWRSSGKNTTNHV
EVNFLEKLTSEGRLGPSTCCSITWFLSWSPCWECSMAIREFLSQHPGVTLIIFVARLFQHMD
RRNRQGLKDLVTSGVTVRVMSVSEYCYCWENFVNYPPGKAAQWPRYPPRWMLMYALELYCII
LGLPPCLKISRRHQKQLTFFSLTPQYCHYKMIPPYILLATGLLQPSVPWR
mdAPOBEC-1 Monodelphis domestica
MNSKTGPSVGDATLRRRIKPWEFVAFFNPQELRKETCLLYEIKWGNQNIWRHSNQNTSQHAE
INFMEKFTAERHFNSSVRCSITWFLSWSPCWECSKAIRKFLDHYPNVTLAIFISRLYWHMDQ
QHRQGLKELVHSGVTIQIMSYSEYHYCWRNFVDYPQGEEDYWPKYPYLWIMLYVLELHCIIL
GLPPCLKISGSHSNQLALFSLDLQDCHYQKIPYNVLVATGLVQPFVTWR
mAPOBEC-2 Mus musculus
MAQKEEAAEAAAPASQNGDDLENLEDPEKLKELIDLPPFEIVTGVRLPVNFFKFQFRNVEYS
SGRNKTFLCYVVEVQSKGGQAQATQGYLEDEHAGAHAEEAFFNTILPAFDPALKYNVTWYVS
SSPCAACADRILKTLSKTKNLRLLILVSRLFMWEEPEVQAALKKLKEAGCKLRIMKPQDFEY
IWQNFVEQEEGESKAFEPWEDIQENFLYYEEKLADILK
hAPOBEC-2 Homo sapiens
MAQKEEAAVATEAASQNGEDLENLDDPEKLKELIELPPFEIVTGERLPANFFKFQFRNVEYS
SGRNKTFLCYVVEAQGKGGQVQASRGYLEDEHAAAHAEEAFFNTILPAFDPALRYNVTWYVS
SSPCAACADRIIKTLSKTKNLRLLILVGRLFMWEEPEIQAALKKLKEAGCKLRIMKPQDFEY
VWQNFVEQEEGESKAFQPWEDIQENFLYYEEKLADILK
ppAPOBEC-2 Pongo pygmaeus
MAQKEEAAAATEAASQNGEDLENLDDPEKLKELIELPPFEIVTGERLPANFFKFQFRNVEYS
SGRNKTFLCYVVEAQGKGGQVQASRGYLEDEHAAAHAEEAFFNTILPAFDPALRYNVTWYVS
SSPCAACADRIIKTLSKTKNLRLLILVGRLFMWEELEIQDALKKLKEAGCKLRIMKPQDFEY
VWQNFVEQEEGESKAFQPWEDIQENFLYYEEKLADILK
btAPOBEC-2 Bos Taurus
MAQKEEAAAAAEPASQNGEEVENLEDPEKLKELIELPPFEIVTGERLPAHYFKFQFRNVEYS
SGRNKTFLCYVVEAQSKGGQVQASRGYLEDEHATNHAEEAFFNSIMPTFDPALRYMVTWYVS
SSPCAACADRIVKTLNKTKNLRLLILVGRLFMWEEPEIQAALRKLKEAGCRLRIMKPQDFEY
IWQNFVEQEEGESKAFEPWEDIQENFLYYEEKLADILK
mAPOBEC-3 Mus musculus
MQPQRLGPRAGMGPFCLGCSHRKCYSPIRNLISQETFKFHFKNLGYAKGRKDTFLCYEVTRK
DCDSPVSLHHGVFKNKDNIHAEICFLYWFHDKVLKVLSPREEFKITWYMSWSPCFECAEQIV
RFLATHHNLSLDIFSSRLYNVQDPETQQNLCRLVQEGAQVAAMDLYEFKKCWKKFVDNGGRR
FRPWKRLLTNFRYQDSKLQEILRPCYISVPSSSSSTLSNICLTKGLPETRFWVEGRRMDPLS
EEEFYSQFYNQRVKHLCYYHRMKPYLCYQLEQFNGQAPLKGCLLSEKGKQHAEILFLDKIRS
MELSQVTITCYLTWSPCPNCAWQLAAFKRDRPDLILHIYTSRLYFHWKRPFQKGLCSLWQSG
ILVDVMDLPQFTDCWTNFVNPKRPFWPWKGLEIISRRTQRRLRRIKESWGLQDLVNDFGNLQ
LGPPMS
hAPOBEC-3A Homo sapiens
MEASPASGPRHLMDPHIFTSNFNNGIGRHKTYLCYEVERLDNGTSVKMDQHRGFLHNQAKNL
LCGFYGRHAELRFLDLVPSLQLDPAQIYRVTWFISWSPCFSWGCAGEVRAFLQENTHVRLRI
FAARIYDYDPLYKEALQMLRDAGAQVSIMTYDEFKHCWDTFVDHQGCPFQPWDGLDEHSQAL
SGRLRAILQNQGN
hAPOBEC-3B Homo sapiens
MNPQIRNPMERMYRDTFYDNFENEPILYGRSYTWLCYEVKIKRGRSNLLWDTGVFRGQVYFK
PQYHAEMCFLSWFCGNQLPAYKCFQITWFVSWTPCPDCVAKLAEFLSEHPNVTLTISAARLY
YYWERDYRRALCRLSQAGARVTIMDYEEFAYCWENFVYNEGQQFMPWYKFDENYAFLHRTLK
EILRYLMDPDTFTFNFNNDPLVLRRRQTYLCYEVERLDNGTWVLMDQHMGFLCNEAKNLLCG
FYGRHAELRFLDLVPSLQLDPAQIYRVTWFISWSPCFSWGCAGEVRAFLQENTHVRLRIFAA
RIYDYDPLYKEALQMLRDAGAQVSIMTYDEFEYCWDTFVYRQGCPFQPWDGLEEHSQALSGR
LRAILQNQGN
hAPOBEC-3C Homo sapiens
MNPQIRNPMKAMYPGTFYFQFKNLWEANDRNETWLCFTVEGIKRRSVVSWKTGVFRNQVDSE
THCHAERCFLSWFCDDILSPNTKYQVTWYTSWSPCPDCAGEVAEFLARHSNVNLTIFTARLY
YFQYPCYQEGLRSLSQEGVAVEIMDYEDFKYCWENFVYNDNEPFKPWKGLKTNFRLLKRRLR
ESLQ
hAPOBEC-3D Homo sapiens
MNPQIRNPMERMYRDTFYDNFENEPILYGRSYTWLCYEVKIKRGRSNLLWDTGVFRGPVLPK
RQSNHRQEVYFRFENHAEMCFLSWFCGNRLPANRRFQITWFVSWNPCLPCVVKVTKFLAEHP
NVTLTISAARLYYYRDRDWRWVLLRLHKAGARVKIMDYEDFAYCWENFVCNEGQPFMPWYKF
DDNYASLHRTLKEILRNPMEAMYPHIFYFHFKNLLKACGRNESWLCFTMEVTKHHSAVFRKR
GVFRNQVDPETHCHAERCFLSWFCDDILSPNTNYEVTWYTSWSPCPECAGEVAEFLARHSNV
NLTIFTARLCYFWDTDYQEGLCSLSQEGASVKIMGYKDFVSCWKNFVYSDDEPFKPWKGLQT
NFRLLKRRLREILQ
hAPOBEC-3F Homo sapiens
MKPHFRNTVERMYRDTFSYNFYNRPILSRRNTVWLCYEVKTKGPSRPRLDAKIFRGQVYSQP
EHHAEMCFLSWFCGNQLPAYKCFQITWFVSWTPCPDCVAKLAEFLAEHPNVTLTISAARLYY
YWERDYRRALCRLSQAGARVKIMDDEEFAYCWENFVYSEGQPFMPWYKFDDNYAFLHRTLKE
ILRNPMEAMYPHIFYFHFKNLRKAYGRNESWLCFTMEVVKHHSPVSWKRGVFRNQVDPETHC
HAERCFLSWFCDDILSPNTNYEVTWYTSWSPCPECAGEVAEFLARHSNVNLTIFTARLYYFW
DTDYQEGLRSLSQEGASVEIMGYKDFKYCWENFVYNDDEPFKPWKGLKYNFLFLDSKLQEIL
E
hAPOBEC-3G Homo sapiens
MKPHFRNTVERMYRDTFSYNFYNRPILSRRNTVWLCYEVKTKGPSRPPLDAKIFRGQVYSEL
KYHPEMRFFHWFSKWRKLHRDQEYEVTWYISWSPCTKCTRDMATFLAEDPKVTLTIFVARLY
YFWDPDYQEALRSLCQKRDGPRATMKIMNYDEFQHCWSKFVYSQRELFEPWNNLPKYYILLH
IMLGEILRHSMDPPTFTFNFNNEPWVRGRHETYLCYEVERMHNDTWVLLNQRRGFLCNQAPH
KHGFLEGRHAELCFLDVIPFWKLDLDQDYRVTCFTSWSPCFSCAQEMAKFISKNKHVSLCIF
TARIYDDQGRCQEGLRTLAEAGAKISIMTYSEFKHCWDTFVDHQGCPFQPWDGLDEHSQDLS
GRLRAILQNQEN
hAPOBEC-4 Homo sapiens
MEPIYEEYLANHGTIVKPYYWLSFSLDCSNCPYHIRTGEEARVSLTEFCQIFGFPYGTTFPQ
TKHLTFYELKTSSGSLVQKGHASSCTGNYIHPESMLFEMNGYLDSAIYNNDSIRHIILYSNN
SPCNEANHCCISKMYNFLITYPGITLSIYFSQLYHTEMDFPASAWNREALRSLASLWPRVVL
SPISGGIWHSVLHSFISGVSGSHVFQPILTGRALADRHNAYEINAITGVKPYFTDVLLQTKR
NPNTKAQEALESYPLNNAFPGQFFQMPSGQLQPNLPPDLRAPVVFVLVPLRDLPPMHMGQNP
NKPRNIVRHLNMPQMSFQETKDLGRLPTGRSVEIVEITEQFASSKEADEKKKKKGKK
mAPOBEC-4 Mus musculus
MDSLLMKQKKFLYHFKNVRWAKGRHETYLCYVVKRRDSATSCsLDFGHLRNKSGCHVELLFL
RYISDWDLDPGRCYRVTWFTSWSPCYDCARHVAEFLRWNPNLSLRIFTARLYFCEDRKAEPE
GLRRLHRAGVQIGIMTFKDYFYCWNTFVENRERTFKAWEGLHENSVRLTRQLRRILLPLYEV
DDLRDAFRMLGF
rAPOBEC-4 Rattus norvegicus
MEPLYEEYLTHSGTIVKPYYWLSVSLNCTNCPYHIRTGEEARVPYTEFHQTFGFPWSTYPQT
KHLTFYELRSSSGNLIQKGLASNCTGSHTHPESMLFERDGYLDSLIFHDSNIRHIILYSNNS
PCDEANHCCISKMYNFLMNYPEVTLSVFFSQLYHTENQFPTSAWNREALRGLASLWPQVTLS
AISGGIWQSILETFVSGISEGLTAVRPFTAGRTLTDRYNAYEINCITEVKPYFTDALHSWQK
ENQDQKVWAASENQPLHNTTPAQWQPDMSQDCRTPAVFMLVPYRDLPPIHVNPSPQKPRTVV
RHLNTLQLSASKVKALRKSPSGRPVKKEEARKGSTRSQEANETNKSKWKKQTLFIKSNICHL
LEREQKKIGILSSWSV
mfAPOBEC-4 Macaca fascicularis
MEPTYEEYLANHGTIVKPYYWLSFSLDCSNCPYHIRTGEEARVSLTEFCQIFGFPYGTTYPQ
TKHLTFYELKTSSGSLVQKGHASSCTGNYIHPESMLFEMNGYLDSAIYNNDSIRHIILYCNN
SPCNEANHCCISKVYNFLITYPGITLSIYFSQLYHTEMDFPASAWNREALRSLASLWPRVVL
SPISGGIWHSVLHSFVSGVSGSHVFQPILTGRALTDRYNAYEINAITGVKPFFTDVLLHTKR
NPNTKAQMALESYPLNNAFPGQSFQMTSGIPPDLRAPVVFVLLPLRDLPPMHMGQDPNKPRN
IIRHLNMPQMSFQETKDLERLPTRRSVETVEITERFASSKQAEEKTKKKKGKK
hAID Homo sapiens
[sequence omitted]
clAID Canis lupus familiaris
MDSLLMKQRKFLYHFKNVRWAKGRHETYLCYVVKRRDSATSFSLDFGHLRNKSGCHVELLFL
RYISDWDLDPGRCYRVTWFTSWSPCYDCARHVADFLRGYPNLSLRIFAARLYFCEDRKAEPE
GLRRLHRAGVQIAIMTFKDYFYCWNTFVENREKTFKAWEGLHENSVRLSRQLRRILLPLYEV
DDLRDAFRTLGL
btAID Bos Taurus
MDSLLKKQRQFLYQFKNVRWAKGRHETYLCYVVKRRDSPTSFSLDFGHLRNKAGCHVELLFL
RYISDWDLDPGRCYRVTWFTSWSPCYDCARHVADFLRGYPNLSLRIFTARLYFCDKERKAEP
EGLRRLHRAGVQIAIMTFKDYFYCWNTFVENHERTFKAWEGLHENSVRLSRQLRRILLPLYE
VDDLRDAFRTLGL
mAID Mus musculus
[sequence omitted]
pmCDA-1 Petromyzon marinus
MAGYECVRVSEKLDFDTFEFQFENLHYATERHRTYVIFDVKPQSAGGRSRRLWGYIINNPNV
CHAELILMSMIDRHLESNPGVYAMTWYMSWSPCANCSSKLNPWLKNLLEEQGHTLTMHFSRI
YDRDREGDHRGLRGLKHVSNSFRMGVVGRAEVKECLAEYVEASRRTLTWLDTTESMAAKMRR
KLFCILVRCAGMRESGIPLHLFTLQTPLLSGRVVWWRV
pmCDA-2 Petromyzon marinus
MELREVVDCALASCVRHEPLSRVAFLRCFAAPSQKPRGTVILFYVEGAGRGVTGGHAVNYNK
QGTSIHAEVLLLSAVRAALLRRRRCEDGEEATRGCTLHCYSTYSPCRDCVEYIQEFGASTGV
RVVIHCCRLYELDVNRRRSEAEGVLRSLSRLGRDFRLMGPRDAIALLLGGRLANTADGESGA
SGNAWVTETNVVEPLVDMTGFGDEDLHAQVQRNKQIREAYANYASAVSLMLGELHVDPDKFP
FLAEFLAQTSVEPSGTPRETRGRPRGASSRGPEIGRQRPADFERALGAYGLFLHPRIVSREA
DREEIKRDLIVVMRKHNYQGP
pmCDA-5 Petromyzon marinus
MAGDENVRVSEKLDFDTFEFQFENLHYATERHRTYVIFDVKPQSAGGRSRRLWGYIINNPNV
CHAELILMSMIDRHLESNPGVYAMTWYMSWSPCANCSSKLNPWLKNLLEEQGHTLMMHFSRI
YDRDREGDHRGLRGLKHVSNSFRMGVVGRAEVKECLAEYVEASRRTLTWLDTTESMAAKMRR
KLFCILVRCAGMRESGMPLHLFT
yCD Saccharomyces cerevisiae
MVTGGMASKWDQKGMDIAYEEAALGYKEGGVPIGGCLINNKDGSVLGRGHNMRFQKGSATLH
GEISTLENCGRLEGKVYKDTTLYTTLSPCDMCTGAIIMYGIPRCVVGENVNFKSKGEKYLQT
RGHEVVVVDDERCKKIMKQFIDERPQDWFEDIGE
rAPOBEC-1 (delta 177-186)
MSSETGPVAVDPTLRRRIEPHEFEVFFDPRELRKETCLLYEINWGGRHSIWRHTSQNTNKHV
EVNFIEKFTTERYFCPNTRCSITWFLSWSPCGECSRAITEFLSRYPHVTLFIYIARLYHHAD
PRNRQGLRDLISSGVTIQIMTEQESGYCWRNFVNYSPSNEAHWPRYPHLWVRGLPPCLNILR
RKQPQLTFFTIALQSCHYQRLPPHILWATGLK
rAPOBEC-1 (delta 202-213)
MSSETGPVAVDPTLRRRIEPHEFEVFFDPRELRKETCLLYEINWGGRHSIWRHTSQNTNKHV
EVNFIEKFTTERYFCPNTRCSITWFLSWSPCGECSRAITEFLSRYPHVTLFIYIARLYHHAD
PRNRQGLRDLISSGVTIQIMTEQESGYCWRNFVNYSPSNEAHWPRYPHLWVRLYVLELYCII
LGLPPCLNILRRKQPQHYQRLPPHILWATGLK

[1132] The gRNAs used encompass the scaffold sequence and the spacer sequence (target sequence) for an AR gene having a trinucleotide repeat expansion. The target sequence for base editing at the 5′ end of exon 1 of the genomic AR nucleic acid sequence was as follows:

5′-AGTGCAGTTAGGGCTGGGAA-3′
(FIG. 80)

[1133] As seen in FIGS. 81 and 82A-82, all of the CBE used provided efficient C-to-T base editing using the gRNA referenced in the Figure. All of the CBE variants assayed had base editing activity compared with control.

[1134] As observed in FIGS. 82A-82I, greater than 63% base editing was achieved at the targeted C using Guide 9. Introduction of a stop codon in Exon 1 resulted in a functional knockout of the AR as shown in FIGS. 83A and 83B where more than 60% editing was observed. The specific sequences of the guides used to produce the results shown in FIGS. 81 and 82A-82I follow:

Guide 8 (U6 through sgRNA scaffold)
TACGTGACGTAGAAAGTAATAATTTCTTGGGTAGTTTGCAGTTTTAAAAT
TATGTTTTAAAATGGACTATCATATGCTTACCGTAACTTGAAAGTATTTC
GATTTCTTGGCTTTATATATCTTGTGGAAAGGACGAAACACCGACTTACC
GCATGTCCCCGTAGTTTTAGAGCTAGAAATAGCAAGTTAAAATAAGGCTA
GTCCGTTATCAACTTGAAAAAGTGGCACCGAGTCGGTGCTTTTTTT
Guide 9 (U6 through sgRNA scaffold)
TACGTGACGTAGAAAGTAATAATTTCTTGGGTAGTTTGCAGTTTTAAAAT
TATGTTTTAAAATGGACTATCATATGCTTACCGTAACTTGAAAGTATTTC
GATTTCTTGGCTTTATATATCTTGTGGAAAGGACGAAACACCGAGTGCAG
TTAGGGCTGGGAAGTTTTAGAGCTAGAAATAGCAAGTTAAAATAAGGCTA
GTCCGTTATCAACTTGAAAAAGTGGCACCGAGTCGGTGCTTTTTTT
Guide 10 (U6 through sgRNA scaffold)
TACGTGACGTAGAAAGTAATAATTTCTTGGGTAGTTTGCAGTTTTAAAAT
TATGTTTTAAAATGGACTATCATATGCTTACCGTAACTTGAAAGTATTTC
GATTTCTTGGCTTTATATATCTTGTGGAAAGGACGAAACACCGAAGTGCA
GTTAGGGCTGGGAGTTTTAGAGCTAGAAATAGCAAGTTAAAATAAGGCTA
GTCCGTTATCAACTTGAAAAAGTGGCACCGAGTCGGTGCTTTTTTT
Guide 11 (U6 through sgRNA scaffold)
TACGTGACGTAGAAAGTAATAATTTCTTGGGTAGTTTGCAGTTTTAAAAT
TATGTTTTAAAATGGACTATCATATGCTTACCGTAACTTGAAAGTATTTC
GATTTCTTGGCTTTATATATCTTGTGGAAAGGACGAAACACCGACCTACC
GAGGAGCTTTCCGTTTTAGAGCTAGAAATAGCAAGTTAAAATAAGGCTAG
TCCGTTATCAACTTGAAAAAGTGGCACCGAGTCGGTGCTTTTTTT
Guide 12 (U6 through sgRNA scaffold)
TACGTGACGTAGAAAGTAATAATTTCTTGGGTAGTTTGCAGTTTTAAAAT
TATGTTTTAAAATGGACTATCATATGCTTACCGTAACTTGAAAGTATTTC
GATTTCTTGGCTTTATATATCTTGTGGAAAGGACGAAACACCGTTCCAGA
GCGTGCGCGAAGGTTTTAGAGCTAGAAATAGCAAGTTAAAATAAGGCTAG
TCCGTTATCAACTTGAAAAAGTGGCACCGAGTCGGTGCTTTTTTT
Guide 13 (U6 through sgRNA scaffold)
TACGTGACGTAGAAAGTAATAATTTCTTGGGTAGTTTGCAGTTTTAAAAT
TATGTTTTAAAATGGACTATCATATGCTTACCGTAACTTGAAAGTATTTC
GATTTCTTGGCTTTATATATCTTGTGGAAAGGACGAAACACCGTTTCCAG
TTTGGAGACTGCCGTTTTAGAGCTAGAAATAGCAAGTTAAAATAAGGCTA
GTCCGTTATCAACTTGAAAAAGTGGCACCGAGTCGGTGCTTTTTTT
Guide 14 (U6 through sgRNA scaffold)
TACGTGACGTAGAAAGTAATAATTTCTTGGGTAGTTTGCAGTTTTAAAAT
TATGTTTTAAAATGGACTATCATATGCTTACCGTAACTTGAAAGTATTTC
GATTTCTTGGCTTTATATATCTTGTGGAAAGGACGAAACACCGTTCCAGT
TTGGAGACTGCCAGTTTTAGAGCTAGAAATAGCAAGTTAAAATAAGGCTA
GTCCGTTATCAACTTGAAAAAGTGGCACCGAGTCGGTGCTTTTTTT
Guide 15 (U6 through sgRNA scaffold)
TACGTGACGTAGAAAGTAATAATTTCTTGGGTAGTTTGCAGTTTTAAAAT
TATGTTTTAAAATGGACTATCATATGCTTACCGTAACTTGAAAGTATTTC
GATTTCTTGGCTTTATATATCTTGTGGAAAGGACGAAACACCGTCCACCC
CAGAAGACCTGCCGTTTTAGAGCTAGAAATAGCAAGTTAAAATAAGGCTA
GTCCGTTATCAACTTGAAAAAGTGGCACCGAGTCGGTGCTTTTTTT

[1135] The PAM sequence used was an NGG PAM (i.e., spCas9), where N may be any one of G, A, C, or T. Guides with the PAMs in bold follow: The nucleotides shown in Table 35 in italics were targeted for editing.

TABLE 35A

| | Guide with PAM bolded/ | | Highest Average Editing |
|---|---|---|---|
| Guide | Edited bases in italics | Base Editor | Obtained to Date |
| Androgen Receptor | ACTTACCGCATGTCCCCGTAAGG | ABE/CBE | ABE: 38.32 (ABE8.7) |
| “Guide 8” | | | CBE: 69.26 (BTX448) |
| Androgen Receptor | AGTGCAGTTAGGGCTGGGAAGGG | CBE | CBE: 52.79 (BTX448) |
| “Guide 9” | | | |
| Androgen Receptor | AAGTGCAGTTAGGGCTGGGAAGG | CBE | CBE: 44.03 (BTX448) |
| “Guide 10” | | | |
| Androgen Receptor | GACCTACCGAGGAGCTTTCCAGA | CBE | in process |
| “Guide 11” | | | |
| Androgen Receptor | GTTCCAGAGCGTGCGCGAAGTGA | CBE | in process |
| “Guide 12” | | | |
| Androgen Receptor | TTTCCAGTTTGGAGACTGCCAGG | ABE | in process |
| “Guide 13” | | | |
| Androgen Receptor | TTCCAGTTTGGAGACTGCCAGGG | ABE | ABE: 30.9323492 |
| “Guide 14” | | | (ABE8.13) |
| Androgen Receptor | TCCACCCCAGAAGACCTGCCTGA | CBE | in process |
| “Guide 15” | | | |

TABLE 35B

| Guide | Type of Edit | Guide with PAM | Base Editor |
|---|---|---|---|
| Androgen | Splice Donor | ACTTACCGCATGTCCCCGTAAGG | ABE/CBE |
| Receptor | Disruption-(end | | |
| “Guide 8” | of exon 1) | | |
| | ABE/CBE | | |
| Androgen | Stop Codon- | AGTGCAGTTAGGGCTGGGAAGGG | CBE |
| Receptor | CAG-TAG- Exon | | |
| “Guide 9” | 1 | | |
| Androgen | Stop Codon- | AAGTGCAGTTAGGGCTGGGAAGG | CBE |
| Receptor | CAG-TAG- Exon | | |
| “Guide 10” | 1 | | |
| Androgen | Stop Codon- | GACCTACCGAGGAGCTTTCCAGA | CBE |
| Receptor | CGA to TGA- | | |
| “Guide 11” | Exon 1 | | |
| Androgen | Stop Codon- | GTTCCAGAGCGTGCGCGAAGTGA | CBE |
| Receptor | CAG-TAG- Exon | | |
| “Guide 12” | 1 | | |
| Androgen | Splice Acceptor | TTTCCAGTTTGGAGACTGCCAGG | ABE |
| Receptor | Disruption- (in | | |
| “Guide 13” | front of Exon 2) | | |
| Androgen | Splice Acceptor | | |
| Receptor | Disruption- (in | TTCCAGTTTGGAGACTGCCAGGG | ABE |
| “Guide 14” | front of Exon 2) | | |
| Androgen | Stop Codon CAG | TCCACCCCAGAAGACCTGCCTGA | CBE |
| Receptor | to TAG- Exon 2 | | |
| “Guide 15” | | | |

### Guide Editing Data

[1136] The editors referenced in Tables 36-40 were used in combination with the designated guides to carry out editing of the AR target nucleotides shown in Table 35 above.

TABLE 36

| | “Guide 8”-ABE Average |
|---|---|
| ABE8.1 | 29.88 |
| ABE8.2 | 25.57 |
| ABE8.3 | 26.69 |
| ABE8.4 | 28.26 |
| ABE8.5 | 11.27 |
| ABE8.6 | 24.00 |
| ABE8.7 | 38.32 |
| ABE8.8 | 37.86 |
| ABE8.9 | 30.64 |
| ABE8.10 | 33.17 |
| ABE8.11 | 20.42 |
| ABE8.12 | 34.48 |
| ABE8.13 | 29.34 |
| ABE8.14 | 32.05 |
| ABE7.10 | 25.87 |
| Control | 0.06 |

TABLE 37

| | “Guide 14”-ABE Average |
|---|---|
| ABE8.1 | 6.13 |
| ABE8.2 | 8.19 |
| ABE8.3 | 7.85 |
| ABE8.4 | 9.44 |
| ABE8.5 | 1.06 |
| ABE8.6 | 4.85 |
| ABE8.7 | 12.26 |
| ABE8.8 | 30.14 |
| ABE8.9 | 28.30 |
| ABE8.10 | 15.06 |
| ABE8.11 | 15.76 |
| ABE8.12 | 11.96 |
| ABE8.13 | 30.93 |
| ABE8.14 | 21.66 |
| ABE7.10 | 7.38 |
| Control | 0.04 |

TABLE 38

| | “Guide 8”-CBE Average |
|---|---|
| BGX5-D10A | 55.52 |
| BGX27-D10A | 57.08 |
| BGX29-D10A | 47.28 |
| BTX 448 | 69.26 |
| Control | 0.03 |

TABLE 39

| | “Guide 9”-Average CBE-C to T |
|---|---|
| | at Position 5 |
| BGX5-D10A | 52.46 |
| BGX27-D10A | 46.16 |
| BGX29-D10A | 41.85 |
| BTX 448 | 52.80 |
| Control | 0.02 |

TABLE 40

| | “Guide 10”-CBE Average total C to T at Position 6 |
|---|---|
| BGX5-D10A | 43.08 |
| BGX27-D10A | 37.34 |
| BGX29-D10A | 30.40 |
| BTX 448 | 44.04 |
| Control | 0.04 |

[1137] The methods used to edit the AR gene are as provided herein or as determined based on the knowledge of the skilled practitioner and as would be understood to the skilled practitioner in the art. (See, e.g., Komor, A. C., et al., “Programmable editing of a target base in genomic DNA without double-stranded DNA cleavage” Nature 533, 420-424 (2016); Gaudelli, N. M., et al., “Programmable base editing of A⋅T to G⋅C in genomic DNA without DNA cleavage” Nature 551, 464-471 (2017); Komor, A. C., et al., “Improved base excision repair inhibition and bacteriophage Mu Gam protein yields C:G-to-T:A base editors with higher efficiency and product purity” Science Advances 3:eaao4774 (2017), and Rees, H. A., et al., “Base editing: precision chemistry on the genome and transcriptome of living cells.” Nat Rev Genet. 2018 December; 19(12):770-788. doi: 10.1038/s41576-018-0059-1).

[1138] The results provided in the Examples described herein were obtained using the following materials and methods.

### Cloning.

[1139] DNA sequences of target polynucleotides and gRNAs and primers used are described herein. For gRNAs, the following scaffold sequence is presented: GUUUUAGAGC UAGAAAUAGC AAGUUAAAAU AAGGCUAGUC CGUUAUCAAC UUGAAAAAGU GGCACCGAGU CGGUGCUUUU. This scaffold was used for the NGG PAM; the gRNAs listed above encompass the scaffold sequence and the spacer sequence (target sequence) for AR.

[1140] PCR was performed using VeraSeq ULtra DNA polymerase (Enzymatics), or Q5 Hot Start High-Fidelity DNA Polymerase (New England Biolabs). Base Editor (BE) plasmids were constructed using USER cloning (New England Biolabs). Deaminase genes were synthesized as gBlocks Gene Fragments (Integrated DNA Technologies). Cas9 genes were obtained from previously reported plasmids. Deaminase and fusion genes were cloned into pCMV (mammalian codon-optimized) or pET28b (E. coli codon-optimized) backbones. sgRNA expression plasmids were constructed using site-directed mutagenesis.

[1141] Briefly, the primers listed herein above were 5′ phosphorylated using T4 Polynucleotide Kinase (New England Biolabs) according to the manufacturer's instructions. Next, PCR was performed using Q5 Hot Start High-Fidelity Polymerase (New England Biolabs) with the phosphorylated primers and the plasmid encoding a gene of interest as a template according to the manufacturer's instructions. PCR products were incubated with DpnI (20 U, New England Biolabs) at 37° C. for 1 hour, purified on a QIAprep spin column (Qiagen), and ligated using QuickLigase (New England Biolabs) according to the manufacturer's instructions. DNA vector amplification was carried out using Mach1 competent cells (ThermoFisher Scientific).

### Expression and Purification of Base Editors

[1142] E. coli BL21 STAR (DE3)-competent cells (ThermoFisher Scientific) were transformed with plasmids (e.g., plasmids encoding the base editors BGX5-D10A, BGX27-D10A, BGX29-D10A, and BTX 448).

[1143] The resulting expression strains were grown overnight in Luria-Bertani (LB) broth containing 100 μg ml-1 of kanamycin at 37° C. The cells were diluted 1:100 into the same growth medium and grown at 37° C. to OD600=˜0.6. The culture was cooled to 4° C. over a period of 2 h, and isopropyl-β-d-1-thiogalactopyranoside (IPTG) was added at 0.5 mM to induce protein expression. After ˜16 h, the cells were collected by centrifugation at 4,000g and were resuspended in lysis buffer (50 mM tris(hydroxymethyl)-aminomethane (Tris)-HCl (pH 7.5), 1 M NaCl, 20% glycerol, 10 mM tris(2-carboxyethyl)phosphine (TCEP, Soltec Ventures)). The cells were lysed by sonication (20 s pulse-on, 20 s pulse-off for 8 min total at 6 W output) and the lysate supernatant was isolated following centrifugation at 25,000g for 15 minutes. The lysate was incubated with His-Pur nickel-nitriloacetic acid (nickel-NTA) resin (ThermoFisher Scientific) at 4° C. for 1 hour to capture the His-tagged fusion protein. The resin was transferred to a column and washed with 40 ml of lysis buffer. The His-tagged fusion protein was eluted in lysis buffer supplemented with 285 mM imidazole, and concentrated by ultrafiltration (Amicon-Millipore, 100-kDa molecular weight cut-off) to 1 ml total volume. The protein was diluted to 20 ml in low-salt purification buffer containing 50 mM tris(hydroxymethyl)-aminomethane (Tris)-HCl (pH 7.0), 0.1 M NaCl, 20% glycerol, 10 mM TCEP and loaded onto SP Sepharose Fast Flow resin (GE Life Sciences). The resin was washed with 40 ml of this low-salt buffer, and the protein eluted with 5 ml of activity buffer containing 50 mM tris(hydroxymethyl)-aminomethane (Tris)-HCl (pH 7.0), 0.5 M NaCl, 20% glycerol, 10 mM TCEP. The eluted proteins were quantified by SDS-PAGE.

In Vitro Transcription of sgRNAs.

[1144] Linear DNA fragments containing the CMV promoter followed by the sgRNA target sequence were transcribed in vitro using the TranscriptAid T7 High Yield Transcription Kit (ThermoFisher Scientific) according to the manufacturer's instructions. sgRNA products were purified using the MEGAclear Kit (ThermoFisher Scientific) according to the manufacturer's instructions and quantified by UV absorbance.

Preparation of Cy3-Conjugated dsDNA Substrates.

[1145] Typically, unlabeled sequence strands (e.g., sequences of 80-nt unlabeled strands) were ordered as PAGE-purified oligonucleotides from IDT. A 25-nt Cy3-labeled primer complementary to the 3′ end of each 80-nt substrate was ordered as an HPLC-purified oligonucleotide from IDT. To generate the Cy3-labeled dsDNA substrates, the 80-nt strands (5 μl of a 100 μM solution) were combined with the Cy3-labeled primer (5 μl of a 100 μM solution) in NEBuffer 2 (38.25 μl of a 50 mM NaCl, 10 mM Tris-HCl, 10 mM MgCl₂, 1 mM DTT, pH 7.9 solution, New England Biolabs) with dNTPs (0.75 μl of a 100 mM solution) and heated to 95° C. for 5 min, followed by a gradual cooling to 45° C. at a rate of 0.1° C. per s. After this annealing period, Klenow exo- (5 U, New England Biolabs) was added and the reaction was incubated at 37° C. for 1 h. The solution was diluted with buffer PB (250 μl, Qiagen) and isopropanol (50 μl) and purified on a QIAprep spin column (Qiagen), eluting with 50 μl of Tris buffer. Deaminase assay on dsDNA. The purified fusion protein (20 μl of 1.9 μM in activity buffer) was combined with 1 equivalent of appropriate sgRNA and incubated at ambient temperature for 5 min. The Cy3-labeled dsDNA substrate was added to final concentration of 125 nM and the resulting solution was incubated at 37° C. for 2 h. The dsDNA was separated from the fusion by the addition of buffer PB (100 μl, Qiagen) and isopropanol (25 μl) and purified on an EconoSpin micro spin column (Epoch Life Science), eluting with 20 μl of CutSmart buffer (New England Biolabs). USER enzyme (1 U, New England Biolabs) was added to the purified, edited dsDNA and incubated at 37° C. for 1 h. The Cy3-labeled strand was fully denatured from its complement by combining 5 μl of the reaction solution with 15 μl of a DMSO-based loading buffer (5 mM Tris, 0.5 mM EDTA, 12.5% glycerol, 0.02% bromophenol blue, 0.02% xylene cyan, 80% DMSO). The full-length C-containing substrate was separated from any cleaved, U-containing edited substrates on a 10% TBE-urea gel (Bio-Rad) and imaged on a GE Amersham Typhoon imager.

Preparation of In Vitro-Edited dsDNA for High-Throughput Sequencing.

[1146] Oligonucleotides were obtained from IDT. Complementary sequences were combined (5 μl of a 100 μM solution) in Tris buffer and annealed by heating to 95° C. for 5 min, followed by a gradual cooling to 45° C. at a rate of 0.1° C. per s to generate 60-bp dsDNA substrates. Purified fusion protein (20 μl of 1.9 μM in activity buffer) was combined with 1 equivalent of appropriate sgRNA and incubated at ambient temperature for 5 min. The 60-mer dsDNA substrate was added to final concentration of 125 nM, and the resulting solution was incubated at 37° C. for 2 h. The dsDNA was separated from the fusion by the addition of buffer PB (100 μl, Qiagen) and isopropanol (25 μl) and purified on a EconoSpin micro spin column (Epoch Life Science), eluting with 20 μl of Tris buffer. The resulting edited DNA (1 μl was used as a template) was amplified by PCR using high-throughput sequencing primer pairs and VeraSeq Ultra (Enzymatics) according to the manufacturer's instructions with 13 cycles of amplification. PCR reaction products were purified using RapidTips (Diffinity Genomics), and the purified DNA was amplified by PCR with primers containing sequencing adapters, purified, and sequenced on a MiSeq high-throughput DNA sequencer (Illumina) as previously described.

### Cell Culture.

[1147] HEK293T (ATCC CRL-3216) were maintained in Dulbecco's Modified Eagle's Medium plus GlutaMax (ThermoFisher) supplemented with 10% (v/v) fetal bovine serum (FBS), at 37° C. with 5% C02. Immortalized cells containing the gene of interest (e.g., a mutant AR gene comprising a trinucleotide repeat expansion) (Taconic Biosciences) were cultured in Dulbecco's Modified Eagle's Medium plus GlutaMax (ThermoFisher Scientific) supplemented with 10% (v/v) fetal bovine serum (FBS) and 200 μg ml-1 Geneticin (ThermoFisher Scientific).

### Transfections.

[1148] HEK293T cells were seeded on 48-well collagen-coated BioCoat plates (Corning) and transfected at approximately 85% confluency. Briefly, 750 ng of BE and 250 ng of sgRNA expression plasmids were transfected using 1.5 μl of Lipofectamine 2000 (ThermoFisher Scientific) per well according to the manufacturer's protocol. HEK293T cells were transfected using appropriate Amaxa Nucleofector II programs according to manufacturer's instructions (V kits using program Q-001 for HEK293T cells).

### High-Throughput DNA Sequencing of Genomic DNA Samples.

[1149] Transfected cells were harvested after 3 days and the genomic DNA was isolated using the Agencourt DNAdvance Genomic DNA Isolation Kit (Beckman Coulter) according to the manufacturer's instructions. On-target and off-target genomic regions of interest were amplified by PCR with flanking high-throughput sequencing primer pair. PCR amplification was carried out with Phusion high-fidelity DNA polymerase (ThermoFisher) according to the manufacturer's instructions using 5 ng of genomic DNA as a template. Cycle numbers were determined separately for each primer pair as to ensure the reaction was stopped in the linear range of amplification. PCR products were purified using RapidTips (Diffinity Genomics). Purified DNA was amplified by PCR with primers containing sequencing adaptors. The products were gel purified and quantified using the Quant-iT PicoGreen dsDNA Assay Kit (ThermoFisher) and KAPA Library Quantification Kit-Illumina (KAPA Biosystems). Samples were sequenced on an Illumina MiSeq as previously described (Pattanayak, Nature Biotechnol. 31, 839-843 (2013)).

### Data Analysis.

[1150] Sequencing reads were automatically demultiplexed using MiSeq Reporter (Illumina), and individual FASTQ files were analysed with a custom Matlab. Each read was pairwise aligned to the appropriate reference sequence using the Smith-Waterman algorithm. Base calls with a Q-score below 31 were replaced with Ns and were thus excluded in calculating nucleotide frequencies. This treatment yields an expected MiSeq base-calling error rate of approximately 1 in 1,000. Aligned sequences in which the read and reference sequence contained no gaps were stored in an alignment table from which base frequencies could be tabulated for each locus. Indel frequencies were quantified with a custom Matlab script using previously described criteria (Zuris, et al., Nature Biotechnol. 33, 73-80 (2015). Sequencing reads were scanned for exact matches to two 10-bp sequences that flank both sides of a window in which indels might occur. If no exact matches were located, the read was excluded from analysis. If the length of this indel window exactly matched the reference sequence the read was classified as not containing an indel. If the indel window was two or more bases longer or shorter than the reference sequence, then the sequencing read was classified as an insertion or deletion, respectively.

### Example 12: An Adenine Base Editor (ABE) or a Cytidine Base Editor (CBE) were Used to Disrupt Splice Acceptor and Splice Donor Sites within an AR Polynucleotide or Introduce Stop Codons into Exon 1 or Exon 2 of AR Gene, Respectively

[1151] In this Example, a C-to-T base editor system was used to introduce a precise C-to-T mutation in a CAG codon encoding glutamine (Gln) in exon 1 of a mutant AR gene, which includes an expanded trinucleotide repeat. The C-to-T base change converts the target “CAG” nucleic acid sequence to TAG, which results in the premature termination of the protein. In other embodiments, a CBE of the invention changes a CAA codon to a TAA, a CGA codon to a TGA, or a TGG codon to a TGA, TAG, or TAA. In addition, an A-to-G base editor system was used to introduce a precise A-to-G mutation in a splice donor site in exon 1 of a mutant AR gene, which includes an expanded trinucleotide repeat. An A-to-G base editor system was also used to produce a precise A-to-G mutation in a splice acceptor site just prior to exon 2. In each of the examples, base editing was tested in the HEK293T cell line. The sequences of the adenine base editors and cytidine base editors are described in Example 11 and in various paragraphs in this application.

[1152] The gRNAs used encompass the scaffold sequence and the spacer sequence (target sequence) for an AR gene having a trinucleotide repeat expansion. The target sequence for base editing at the 5′ end of exon 1 of the genomic AR nucleic acid sequence was as follows: 5′-AGTGCAGTTAGGGCTGGGAA-3′ (FIG. 80).

[1153] ABEs were used to produce a precise A-to-G mutation in a splice acceptor site just prior to exon 2 by efficiently targeting the “A” nucleobase in the splice acceptor in the AR genomic nucleic acid sequence and converting A>G at the targeted site. The guide RNA (gRNA) was used to target adenosine (“A”) of the “AG” splice acceptor nucleic acid in conjunction with ABE8 base editor variants, namely, ABE8.1-ABE8.14, and ABE7.10 (FIG. 85). In addition, CBEs were used to introduce a precise C-to-T mutation in a CAG codon encoding glutamine (Gln) in exon 1 of a mutant AR gene by efficiently targeting the “C” nucleobase located exon 1 of the AR genomic nucleic acid sequence and converting C>T at the targeted site. The guide RNA (gRNA) was used to target cytidine (“C”) in conjuction with CBE base editor variants (e.g., BE4 or BGX5, BGX27, BGX29, BTX448; FIGS. 84A, 86A, 87A, and 88). Base editing was tested in the HEK293T cell line.

[1154] FIGS. 84B, 86B, 87B, and 89-93 show A-to-G or C-to-T base editing efficiency of ABE and CBE base editors tested with different gRNAs as detected by deep sequencing PCR products.

[1155] In Table 41A, gRNA nucleic acid sequences and PAM sequences are described.

TABLE 41A

| Guide | | | | | Editor to be |
|---|---|---|---|---|---|
| Number | Gene | Guide | PAM | Guide with PAM | used |
| 8 | AR | ACTTACCGCATGTCCCCGTA | NGG | ACTTACCGCATGTCCCCGTAAGG | ABE/CBE |
| 9 | AR | AGTGCAGTTAGGGCTGGGAA | NGG | AGTGCAGTTAGGGCTGGGAAGGG | CBE |
| 10 | AR | AAGTGCAGTTAGGGCTGGGA | GGG | AAGTGCAGTTAGGGCTGGGAAGG | CBE |
| 11 | AR | GACCTACCGAGGAGCTTTCC | NGA | GACCTACCGAGGAGCTTTCCAGA | CBE |
| 12 | AR | GTTCCAGAGCGTGCGCGAAG | NGAT | GTTCCAGAGCGTGCGCGAAGTGA | CBE |
| 13 | AR | TTTCCAGTTTGGAGACTGCC | NGG | TTTCCAGTTTGGAGACTGCCAGG | ABE |
| 14 | AR | TTCCAGTTTGGAGACTGCCA | NGG | TTCCAGTTTGGAGACTGCCAGGG | ABE |
| 15 | AR | TCCACCCCAGAAGACCTGCC | NGAT | TCCACCCCAGAAGACCTGCCTGA | CBE |

[1156] In Table 41B, highest on-target base editing at the target site is presented for several gRNAs and ABE/CBEs.

TABLE 41B

| Guide Number | Gene | Guide with PAM | Editor | Homology | Highest on Target Edit |
|---|---|---|---|---|---|
| 8 | AR | ACTTACCGCATGTCCCCGTAAGG | ABE/CBE | Hum, Cyn, Rhe | ABE: 42% |
| | | | | | CBE: >50% |
| 9 | AR | AGTGCAGTTAGGGCTGGGAAGGG | CBE | Hum | 54.33% |
| 10 | AR | AAGTGCAGTTAGGGCTGGGAAGG | CBE | Hum | 44.35% |
| 11 | AR | GACCTACCGAGGAGCTTTCCAGA | CBE | Hum, Cyn, Rhe | <15% |
| 12 | AR | GTTCCAGAGCGTGCGCGAAGTGA | ABE | Hum | 40.74% |
| 13 | AR | TTTCCAGTTTGGAGACTGCCAGG | ABE | Hum, Cyn, Rhe | * <10% |
| 14 | AR | TTCCAGTTTGGAGACTGCCAGGG | ABE | Hum, Cyn, Rhe | 38% |
| 15 | AR | TCCACCCCAGAAGACCTGCCTGA | CBE | Hum, Mus, Rat, Cyn, Rhe | <10% |

[1157] In Tables 42-46, the percent of A to G or C to T base editing at the target site and near the target site (e.g., bystanders) achieved by several different ARE8 (or ABE7.10) adenosine base editors, PV adenosine base editors, or CBEs (such as BE4 and BGX variants), as described herein and different sgRNAs compared with controls is shown.

TABLE 42
SBMA guide 8

| sample | seq_name | target_site_seq | C2T | C6A | C6G | C6T | C7A | C7G | C7T | C9T | C14T | C15T |
|---|---|---|---|---|---|---|---|---|---|---|---|---|
| S145-AR- | PCR_BTx080 | ACTTACCGCA | 3.36 | 0.42 | 1.01 | 57.14 | 0.31 | 0.05 | 53.05 | 1.56 | 6.41 | 0.36 |
| Guide-8- | | TGTCCCCGTA | | | | | | | | | | |
| 268 | | AGG | | | | | | | | | | |
| S146-AR- | PCR_BTx080 | ACTTACCGCA | 13.61 | 0.19 | 0.29 | 58.46 | 0.04 | 0.02 | 18.52 | 2.74 | 1.66 | 0.45 |
| Guide-8- | | TGTCCCCGTA | | | | | | | | | | |
| 269 | | AGG | | | | | | | | | | |
| S147-AR- | PCR_BTx080 | ACTTACCGCA | 13.09 | 0.03 | 0.22 | 45.43 | 0.04 | 0 | 15 | 2.23 | 1.14 | 0.3 |
| Guide-8- | | TGTCCCCGTA | | | | | | | | | | |
| 270 | | AGG | | | | | | | | | | |
| S148-AR- | PCR_BTx080 | ACTTACCGCA | 2.18 | 0.53 | 1.54 | 64.93 | 0.71 | 0.5 | 64.55 | 0.9 | 8.78 | 0.48 |
| Guide-8- | | TGTCCCCGTA | | | | | | | | | | |
| 271 | | AGG | | | | | | | | | | |
| S149-AR- | PCR_BTx080 | ACTTACCGCA | 0 | 0.01 | 0 | 0.02 | 0.01 | 0 | 0.01 | 0.01 | 0.01 | 0.01 |
| Guide-8- | | TGTCCCCGTA | | | | | | | | | | |
| Water | | AGG | | | | | | | | | | |
| S150-AR- | PCR_BTx080 | ACTTACCGCA | 3.2 | 0.41 | 1.17 | 53.82 | 0.14 | 0.11 | 49.8 | 1.55 | 6.12 | 0.26 |
| Guide-8- | | TGTCCCCGTA | | | | | | | | | | |
| 268 | | AGG | | | | | | | | | | |
| S151-AR- | PCR_BTx080 | ACTTACCGCA | 14.08 | 0.11 | 0.3 | 57.49 | 0.07 | 0.04 | 19.6 | 2.31 | 1.48 | 0.37 |
| Guide-8- | | TGTCCCCGTA | | | | | | | | | | |
| 269 | | AGG | | | | | | | | | | |
| S152-AR- | PCR_BTx080 | ACTTACCGCA | 14.25 | 0.17 | 0.18 | 48.51 | 0.06 | 0.01 | 15.7 | 1.83 | 1 | 0.25 |
| Guide-8- | | TGTCCCCGTA | | | | | | | | | | |
| 270 | | AGG | | | | | | | | | | |
| S153-AR- | PCR_BTx080 | ACTTACCGCA | 2.59 | 0.75 | 0.98 | 69.27 | 0.78 | 0.45 | 68.4 | 1.18 | 8.11 | 0.64 |
| Guide-8- | | TGTCCCCGTA | | | | | | | | | | |
| 271 | | AGG | | | | | | | | | | |
| S154-AR- | PCR_BTx080 | ACTTACCGCA | 0 | 0.01 | 0 | 0.02 | 0.01 | 0 | 0.02 | 0.01 | 0.02 | 0.01 |
| Guide-8- | | TGTCCCCGTA | | | | | | | | | | |
| Water | | AGG | | | | | | | | | | |
| S155-AR- | PCR_BTx080 | ACTTACCGCA | 3.53 | 0.21 | 0.82 | 55.58 | 0.16 | 0.09 | 50.7 | 1.65 | 6.61 | 0.39 |
| Guide-8- | | TGTCCCCGTA | | | | | | | | | | |
| 268 | | AGG | | | | | | | | | | |
| S156-AR- | PCR_BTx080 | ACTTACCGCA | 12.92 | 0.16 | 0.37 | 55.27 | 0.03 | 0.02 | 17.49 | 2.44 | 1.59 | 0.37 |
| Guide-8- | | TGTCCCCGTA | | | | | | | | | | |
| 269 | | AGG | | | | | | | | | | |
| S157-AR- | PCR_BTx080 | ACTTACCGCA | 13.5 | 0.16 | 0.3 | 47.89 | 0.05 | 0.02 | 14.24 | 1.72 | 1.1 | 0.21 |
| Guide-8- | | TGTCCCCGTA | | | | | | | | | | |
| 270 | | AGG | | | | | | | | | | |
| S158-AR- | PCR_BTx080 | ACTTACCGCA | 2.94 | 0.66 | 1.26 | 73.57 | 0.76 | 0.55 | 73.02 | 1.43 | 9.46 | 0.54 |
| Guide-8- | | TGTCCCCGTA | | | | | | | | | | |
| 271 | | AGG | | | | | | | | | | |
| S159-AR- | PCR_BTx080 | ACTTACCGCA | 0 | 0.01 | 0 | 0.04 | 0.01 | 0 | 0.03 | 0 | 0 | 0 |
| Guide-8- | | TGTCCCCGTA | | | | | | | | | | |
| Water | | AGG | | | | | | | | | | |

TABLE 43
SBMA guide 9

| sample | seq_name | target_site_seq | A1G | G2A | T3C | T3G | C5A | C5G | C5T | A6G | T9A | A10G | C14A | T15A |
|---|---|---|---|---|---|---|---|---|---|---|---|---|---|---|
| S160- | PCR_BTx081 | AGTGCAGT | 0.42 | 0.07 | 0.45 | 0.32 | 0.97 | 1.34 | 63.56 | 0.41 | 0.57 | 0.32 | 0.49 | 0.52 |
| AR- | | TAGGGCTG | | | | | | | | | | | | |
| Guide-9- | | GGAAGGG | | | | | | | | | | | | |
| 268 | | | | | | | | | | | | | | |
| S161- | PCR_BTx081 | AGTGCAGT | 0.08 | 0.01 | 0.08 | 0.06 | 0.56 | 0.55 | 53.02 | 0.09 | 0.09 | 0.05 | 0.08 | 0.1 |
| AR- | | TAGGGCTG | | | | | | | | | | | | |
| Guide-9- | | GGAAGGG | | | | | | | | | | | | |
| 269 | | | | | | | | | | | | | | |
| S162- | PCR_BTx081 | AGTGCAGT | 0.01 | 0.01 | 0.01 | 0.02 | 0.23 | 0.22 | 48.38 | 0.01 | 0 | 0.01 | 0.03 | 0.01 |
| AR- | | TAGGGCTG | | | | | | | | | | | | |
| Guide-9- | | GGAAGGG | | | | | | | | | | | | |
| 270 | | | | | | | | | | | | | | |
| S163- | PCR_BTx081 | AGTGCAGT | 0.52 | 0.58 | 0.56 | 0.36 | 1.99 | 1.82 | 67.3 | 0.54 | 0.64 | 0.22 | 0.63 | 0.59 |
| AR- | | TAGGGCTG | | | | | | | | | | | | |
| Guide-9- | | GGAAGGG | | | | | | | | | | | | |
| 271 | | | | | | | | | | | | | | |
| S164- | PCR_BTx081 | AGTGCAGT | 0 | 0.01 | 0.03 | 0 | 0.02 | 0 | 0.03 | 0.01 | 0 | 0.01 | 0.01 | 0 |
| AR- | | TAGGGCTG | | | | | | | | | | | | |
| Guide-9- | | GGAAGGG | | | | | | | | | | | | |
| water | | | | | | | | | | | | | | |
| S165- | PCR_BTx081 | AGTGCAGT | 0.31 | 0.08 | 0.34 | 0.24 | 1.15 | 1.33 | 63.48 | 0.33 | 0.45 | 0.22 | 0.41 | 0.46 |
| AR- | | TAGGGCTG | | | | | | | | | | | | |
| Guide-9- | | GGAAGGG | | | | | | | | | | | | |
| 268 | | | | | | | | | | | | | | |
| S166- | PCR_BTx081 | AGTGCAGT | 0.07 | 0.04 | 0.09 | 0.04 | 0.57 | 0.49 | 52.57 | 0.07 | 0.1 | 0.04 | 0.09 | 0.08 |
| AR- | | TAGGGCTG | | | | | | | | | | | | |
| Guide-9- | | GGAAGGG | | | | | | | | | | | | |
| 269 | | | | | | | | | | | | | | |
| S167- | PCR_BTx081 | AGTGCAGT | 0.01 | 0.02 | 0.02 | 0.04 | 0.15 | 0.25 | 46.64 | 0.02 | 0.02 | 0.03 | 0.01 | 0.01 |
| AR- | | TAGGGCTG | | | | | | | | | | | | |
| Guide-9- | | GGAAGGG | | | | | | | | | | | | |
| 270 | | | | | | | | | | | | | | |
| S168- | PCR_BTx081 | AGTGCAGT | 0.61 | 0.28 | 0.68 | 0.43 | 1.23 | 2.02 | 67.03 | 0.64 | 0.72 | 0.38 | 0.84 | 0.94 |
| AR- | | TAGGGCTG | | | | | | | | | | | | |
| Guide-9- | | GGAAGGG | | | | | | | | | | | | |
| 271 | | | | | | | | | | | | | | |
| S169- | PCR_BTx081 | AGTGCAGT | 0.01 | 0 | 0.01 | 0.01 | 0.01 | 0 | 0.02 | 0.01 | 0 | 0 | 0 | 0 |
| AR- | | TAGGGCTG | | | | | | | | | | | | |
| Guide-9- | | GGAAGGG | | | | | | | | | | | | |
| water | | | | | | | | | | | | | | |
| S170- | PCR_BTx081 | AGTGCAGT | 0.5 | 0.06 | 0.53 | 0.2 | 0.98 | 1.62 | 66.74 | 0.53 | 0.64 | 0.19 | 0.5 | 0.59 |
| AR- | | TAGGGCTG | | | | | | | | | | | | |
| Guide-9- | | GGAAGGG | | | | | | | | | | | | |
| 268 | | | | | | | | | | | | | | |
| S171- | PCR_BTx081 | AGTGCAGT | 0.05 | 0.02 | 0.06 | 0.07 | 0.49 | 0.53 | 54.1 | 0.05 | 0.07 | 0.06 | 0.07 | 0.09 |
| AR- | | TAGGGCTG | | | | | | | | | | | | |
| Guide-9- | | GGAAGGG | | | | | | | | | | | | |
| 269 | | | | | | | | | | | | | | |
| S172- | PCR_BTx081 | AGTGCAGT | 0 | 0.03 | 0.01 | 0.03 | 0.24 | 0.22 | 47.88 | 0.01 | 0.01 | 0.02 | 0.03 | 0.02 |
| AR- | | TAGGGCTG | | | | | | | | | | | | |
| Guide-9- | | GGAAGGG | | | | | | | | | | | | |
| 270 | | | | | | | | | | | | | | |
| S173- | PCR_BTx081 | AGTGCAGT | 0.72 | 0.23 | 0.82 | 0.57 | 1.31 | 2.26 | 67.16 | 0.77 | 1.02 | 0.52 | 0.91 | 1.01 |
| AR- | | TAGGGCTG | | | | | | | | | | | | |
| Guide-9- | | GGAAGGG | | | | | | | | | | | | |
| 271 | | | | | | | | | | | | | | |
| S174- | PCR_BTx081 | AGTGCAGT | 0.01 | 0.01 | 0.01 | 0.01 | 0.01 | 0 | 0.02 | 0.02 | 0 | 0.01 | 0 | 0 |
| AR- | | TAGGGCTG | | | | | | | | | | | | |
| Guide-9- | | GGAAGGG | | | | | | | | | | | | |
| water | | | | | | | | | | | | | | |

TABLE 44
SBMA guide 10

| sample | seq_name | target_site_seq | A2G | T4C | T4G | C6A | C6G | C6T | A7G | T9G | T10A | T10C | A11G | C15A | T16A | G23A |
|---|---|---|---|---|---|---|---|---|---|---|---|---|---|---|---|---|
| S175- | PCR_BTx081 | AAGTGCA | 0.78 | 0.87 | 0.94 | 0.98 | 2.26 | 56.73 | 0.8 | 0.76 | 1.1 | 0.61 | 0.87 | 0.98 | 1.24 | 0.6 |
| AR- | | GTTAGGG | | | | | | | | | | | | | | |
| Guide | | CTGGGAA | | | | | | | | | | | | | | |
| 10-268 | | GG | | | | | | | | | | | | | | |
| S176- | PCR_BTx081 | AAGTGCA | 0.07 | 0.1 | 0 | 0.19 | 0.26 | 43.35 | 0.1 | 0.02 | 0.07 | 0.01 | 0.01 | 0.08 | 0.07 | 0.02 |
| AR- | | GTTAGGG | | | | | | | | | | | | | | |
| Guide | | CTGGGAA | | | | | | | | | | | | | | |
| 10-269 | | GG | | | | | | | | | | | | | | |
| S177- | PCR_BTx081 | AAGTGCA | 0.08 | 0.09 | 0.01 | 0.21 | 0.16 | 35.1 | 0.09 | 0.04 | 0.08 | 0.01 | 0 | 0.07 | 0.08 | 0.08 |
| AR- | | GTTAGGG | | | | | | | | | | | | | | |
| Guide | | CTGGGAA | | | | | | | | | | | | | | |
| 10-270 | | GG | | | | | | | | | | | | | | |
| S178- | PCR_BTx081 | AAGTGCA | 1.28 | 1.36 | 0.65 | 1.03 | 2.64 | 55.13 | 1.33 | 0.45 | 1.62 | 0.38 | 0.62 | 1.44 | 1.64 | 0.9 |
| AR- | | GTTAGGG | | | | | | | | | | | | | | |
| Guide | | CTGGGAA | | | | | | | | | | | | | | |
| 10-271 | | GG | | | | | | | | | | | | | | |
| S179- | PCR_BTx081 | AAGTGCA | 0 | 0.02 | 0.01 | 0.01 | 0 | 0.04 | 0.01 | 0.03 | 0 | 0 | 0.01 | 0.01 | 0 | 0 |
| AR- | | GTTAGGG | | | | | | | | | | | | | | |
| Guide | | CTGGGAA | | | | | | | | | | | | | | |
| 10- | | GG | | | | | | | | | | | | | | |
| water | | | | | | | | | | | | | | | | |
| S180- | PCR_BTx081 | AAGTGCA | 0.54 | 0.56 | 0.38 | 0.97 | 1.43 | 52.81 | 0.54 | 0.32 | 0.69 | 0.23 | 0.31 | 0.6 | 0.72 | 0.32 |
| AR- | | GTTAGGG | | | | | | | | | | | | | | |
| Guide | | CTGGGAA | | | | | | | | | | | | | | |
| 10-268 | | GG | | | | | | | | | | | | | | |
| S181- | PCR_BTx081 | AAGTGCA | 0.09 | 0.11 | 0.05 | 0.28 | 0.32 | 42.45 | 0.11 | 0.02 | 0.1 | 0.01 | 0.03 | 0.1 | 0.1 | 0.08 |
| AR- | | GTTAGGG | | | | | | | | | | | | | | |
| Guide | | CTGGGAA | | | | | | | | | | | | | | |
| 10-269 | | GG | | | | | | | | | | | | | | |
| S182- | PCR_BTx081 | AAGTGCA | 0.02 | 0.02 | 0.03 | 0.07 | 0.17 | 34.45 | 0.03 | 0.04 | 0.01 | 0.02 | 0.01 | 0.02 | 0.01 | 0.02 |
| AR- | | GTTAGGG | | | | | | | | | | | | | | |
| Guide | | CTGGGAA | | | | | | | | | | | | | | |
| 10-270 | | GG | | | | | | | | | | | | | | |
| S183- | PCR_BTx081 | AAGTGCA | 0.84 | 0.93 | 0.89 | 1.11 | 1.99 | 57.34 | 1.01 | 0.45 | 1.42 | 0.29 | 0.72 | 1 | 1.16 | 0.67 |
| AR- | | GTTAGGG | | | | | | | | | | | | | | |
| Guide | | CTGGGAA | | | | | | | | | | | | | | |
| 10-271 | | GG | | | | | | | | | | | | | | |
| S184- | PCR_BTx081 | AAGTGCA | 0.01 | 0.01 | 0.01 | 0.01 | 0 | 0.02 | 0.03 | 0.05 | 0 | 0 | 0 | 0.01 | 0 | 0 |
| AR- | | GTTAGGG | | | | | | | | | | | | | | |
| Guide | | CTGGGAA | | | | | | | | | | | | | | |
| 10- | | GG | | | | | | | | | | | | | | |
| water | | | | | | | | | | | | | | | | |
| S185- | PCR_BTx081 | AAGTGCA | 0.68 | 0.76 | 0.37 | 1.12 | 1.6 | 53.46 | 0.72 | 0.27 | 1.27 | 0.18 | 0.56 | 0.77 | 0.88 | 0.37 |
| AR- | | GTTAGGG | | | | | | | | | | | | | | |
| Guide | | CTGGGAA | | | | | | | | | | | | | | |
| 10-268 | | GG | | | | | | | | | | | | | | |
| S186- | PCR_BTx081 | AAGTGCA | 0.11 | 0.11 | 0.07 | 0.23 | 0.35 | 40.82 | 0.11 | 0.13 | 0.1 | 0.05 | 0.07 | 0.12 | 0.15 | 0.1 |
| AR- | | GTTAGGG | | | | | | | | | | | | | | |
| Guide | | CTGGGAA | | | | | | | | | | | | | | |
| 10-269 | | GG | | | | | | | | | | | | | | |
| S187- | PCR_BTx081 | AAGTGCA | 0.01 | 0.01 | 0.02 | 0.1 | 0.2 | 32.26 | 0.02 | 0.04 | 0.02 | 0.01 | 0.03 | 0.03 | 0.01 | 0 |
| AR- | | GTTAGGG | | | | | | | | | | | | | | |
| Guide | | CTGGGAA | | | | | | | | | | | | | | |
| 10-270 | | GG | | | | | | | | | | | | | | |
| S188- | PCR_BTx081 | AAGTGCA | 0.83 | 0.96 | 0.9 | 1.41 | 2.14 | 57.9 | 1.01 | 0.57 | 1.27 | 0.39 | 0.45 | 1.03 | 1.33 | 0.56 |
| AR- | | GTTAGGG | | | | | | | | | | | | | | |
| Guide | | CTGGGAA | | | | | | | | | | | | | | |
| 10-271 | | GG | | | | | | | | | | | | | | |
| S189- | PCR_BTx081 | AAGTGCA | 0.01 | 0.02 | 0.01 | 0 | 0 | 0.06 | 0.02 | 0.04 | 0 | 0.01 | 0.01 | 0.01 | 0 | 0 |
| AR- | | GTTAGGG | | | | | | | | | | | | | | |
| Guide | | CTGGGAA | | | | | | | | | | | | | | |
| 10- | | GG | | | | | | | | | | | | | | |
| water | | | | | | | | | | | | | | | | |

TABLE 45
SBMA guide 11

| sample | seq_name | target_site_seq | C3T | C4T | C7A | C7T | C8T |
|---|---|---|---|---|---|---|---|
| S001-PV284-G11-ACM- | PCR_BTx081 | GACCTACCGAGGAGCTT | 5.53 | 7.86 | 0.58 | 12.11 | 12.53 |
| 3318 | | TCCAGA | | | | | |
| S013-PV284-G11-ACM- | PCR_BTx081 | GACCTACCGAGGAGCTT | 1.74 | 8.56 | 0.92 | 16.46 | 16.76 |
| 3318 | | TCCAGA | | | | | |
| S025-PV284-G11-ACM- | PCR_BTx081 | GACCTACCGAGGAGCTT | 1.25 | 10.21 | 0.05 | 16.9 | 16.43 |
| 3318 | | TCCAGA | | | | | |
| S073-Control-G11-G12- | PCR_BTx081 | GACCTACCGAGGAGCTT | 0.01 | 0 | 0.04 | 0.01 | 0 |
| ACM-3319- | | TCCAGA | | | | | |
| GACCTACCGAGGAGCTT | | | | | | | |
| TCCAGA | | | | | | | |
| S085-Control-G11-G12- | PCR_BTx081 | GACCTACCGAGGAGCTT | 0 | 0 | 0.04 | 0.02 | 0.01 |
| ACM-3319- | | TCCAGA | | | | | |
| GACCTACCGAGGAGCTT | | | | | | | |
| TCCAGA | | | | | | | |

TABLE 46
SBMA guide 12

| sample | seq_name | target_site_seq | C4T | C5T | T12G | C14T | T21G |
|---|---|---|---|---|---|---|---|
| S037-PV284-G12-ACM- | PCR_BTx081 | GTTCCAGAGCGTGCGCG | 40.9 | 40.77 | 0.79 | 0.02 | 0.26 |
| 3320 | | AAGTGA | | | | | |
| S049-PV284-G12-ACM- | PCR_BTx081 | GTTCCAGAGCGTGCGCG | 37.57 | 38.29 | 0.62 | 0.56 | 0.36 |
| 3320 | | AAGTGA | | | | | |
| S061-PV284-G12-ACM- | PCR_BTx081 | GTTCCAGAGCGTGCGCG | 39.5 | 40.45 | 0.82 | 0 | 0.3 |
| 3320 | | AAGTGA | | | | | |
| S073-Control-G11-G12- | PCR_BTx081 | GTTCCAGAGCGTGCGCG | 0.12 | 0.1 | 0.95 | 0 | 0.13 |
| ACM-3319- | | AAGTGA | | | | | |
| GTTCCAGAGCGTGCGCG | | | | | | | |
| AAGTGA | | | | | | | |
| S085-Control-G11-G12- | PCR_BTx081 | GTTCCAGAGCGTGCGCG | 0.01 | 0.01 | 0.38 | 0.08 | 0.59 |
| ACM-3319- | | AAGTGA | | | | | |
| GTTCCAGAGCGTGCGCG | | | | | | | |
| AAGTGA | | | | | | | |

### Sequences

[1158] In the following sequence, lower case denotes the kanamycin resistance promoter region, bold sequence indicates targeted inactivation portion (Q4* and W15*), the italicized sequence denotes the targeted inactive site of kanamycin resistance gene (D208N), and the underlined sequences denote the PAM sequences.

Inactivated kanamycin resistance gene:
ccggaattgccagctggggcgccctctggtaaggttgggaagccctgcaa
agtaaactggatggctttcttgccgccaaggatctgatggcgcaggggat
caagatctgatcaagagacaggatgaggatcctttcgcATGATCGAATAA
GATGGATTGCACGCAGGTTCTCCGGCCGCTTAGGTGGAGCGCCTATTCGG
CTATGACTGGGCACAACAGACAATCGGCTGCTCTGATGCCGCCGTGTTCC
GGCTGTCAGCGCAGGGGCGCCCGGTTCTTTTTGTCAAGACCGACCTGTCC
GGTGCCCTGAATGAACTGCAGGACGAGGCAGCGCGGCTATCGTGGCTGGC
CACGACGGGCGTTCCTTGCGCAGCTGTGCTCGACGTTGTCACTGAAGCGG
GAAGGGACTGGCTGCTATTGGGCGAAGTGCCGGGGCAGGATCTCCTGTCA
TCTCACCTTGCTCCTGCCGAGAAAGTATCCATCATGGCTGATGCAATGCG
GCGGCTGCATACGCTTGATCCGGCTACCTGCCCATTCGACCACCAAGCGA
AACATCGCATCGAGCGAGCACGTACTCGGATGGAAGCCGGTCTTGTCGAT
CAGGATGATCTGGACGAAGAGCATCAGGGGCTCGCGCCAGCCGAACTGTT
CGCCAGGCTCAAGGCGCGCATGCCCGACGGCGAGGATCTCGTCGTGACCC
ATGGCGATGCCTGCTTGCCGAATATCATGGTGGAAAATGGCCGCTTTTCT
GGATTCATTAACTGTGGCCGGCTGGGTGTGGCGGACCGCTATCAGGACAT
AGCGTTGGCTACCCGTGATATTGCTGAAGAGCTTGGCGGCGAATGGGCTG
ACCGCTTCCTCGTGCTTTACGGTATCGCCGCTCCCGATTCGCAGCGCATC
GCCTTCTATCGCCTTCTTGACGAGTTCTTCTAA

[1159] In the following sequences, the plain text denotes an adenosine deaminase sequence, bold sequence indicates sequence derived from Cas9, the italicized sequence denotes a linker sequence, underlined sequence denotes a bipartite nuclear localization sequence, and double underlined sequence indicates mutations.

CP5 (with MSP “NGC” PID and “D10A” nickase):
EIGKATAKYFFYSNIMNFFKTEITLANGEIRKRPLIETNGETGEIVWDKGRDFATVRKVLSM
PQVNIVKKTEVQTGGFSKESILPKRNSDKLIARKKDWDPKKYGGFMQPTVAYSVLVVAKVEK
GKSKKLKSVKELLGITIMERSSFEKNPIDFLEAKGYKEVKKDLIIKLPKYSLFELENGRKRM
LASAKFLQKGNELALPSKYVNFLYLASHYEKLKGSPEDNEQKQLFVEQHKHYLDEIIEQISE
FSKRVILADANLDKVLSAYNKHRDKPIREQAENIIHLFTLTNLGAPRAFKYFDTTIARKEYR
STKEVLDATLIHQSITGLYETRIDLSQLGGDGGSGGSGGSGGSGGSGGSGGMDKKYSIGLAI
GTNSVGWAVITDEYKVPSKKFKVLGNTDRHSIKKNLIGALLFDSGETAEATRLKRTARRRYT
RRKNRICYLQEIFSNEMAKVDDSFFHRLEESFLVEEDKKHERHPIFGNIVDEVAYHEKYPTI
YHLRKKLVDSTDKADLRLIYLALAHMIKFRGHFLIEGDLNPDNSDVDKLFIQLVQTYNQLFE
ENPINASGVDAKAILSARLSKSRRLENLIAQLPGEKKNGLFGNLIALSLGLTPNFKSNFDLA
EDAKLQLSKDTYDDDLDNLLAQIGDQYADLFLAAKNLSDAILLSDILRVNTEITKAPLSASM
IKRYDEHHQDLTLLKALVRQQLPEKYKEIFFDQSKNGYAGYIDGGASQEEFYKFIKPILEKM
DGTEELLVKLNREDLLRKQRTFDNGSIPHQIHLGELHAILRRQEDFYPFLKDNREKIEKILT
FRIPYYVGPLARGNSRFAWMTRKSEETITPWNFEEVVDKGASAQSFIERMTNFDKNLPNEKV
LPKHSLLYEYFTVYNELTKVKYVTEGMRKPAFLSGEQKKAIVDLLFKTNRKVTVKQLKEDYF
KKIECFDSVEISGVEDRFNASLGTYHDLLKIIKDKDFLDNEENEDILEDIVLTLTLFEDREM
IEERLKTYAHLFDDKVMKQLKRRRYTGWGRLSRKLINGIRDKQSGKTILDFLKSDGFANRNF
MQLIHDDSLTFKEDIQKAQVSGQGDSLHEHIANLAGSPAIKKGILQTVKVVDELVKVMGRHK
PENIVIEMARENQTTQKGQKNSRERMKRIEEGIKELGSQILKEHPVENTQLQNEKLYLYYLQ
NGRDMYVDQELDINRLSDYDVDHIVPQSFLKDDSIDNKVLTRSDKNRGKSDNVPSEEVVKKM
KNYWRQLLNAKLITQRKFDNLTKAERGGLSELDKAGFIKRQLVETRQITKHVAQILDSRMNT
KYDENDKLIREVKVITLKSKLVSDFRKDFQFYKVREINNYHHAHDAYLNAVVGTALIKKYPK
LESEFVYGDYKVYDVRKMIAKSEQEGADKRTADGSEFESPKKKRKV*
ABE8.1_Y147T_CP5_NGC PAM_monomer
MSEVEFSHEYWMRHALTLAKRARDEREVPVGAVLVLNNRVIGEGWNRAIGLHDPTAHAEIMA
LRQGGLVMQNYRLIDATLYVTFEPCVMCAGAMIHSRIGRVVFGVRNAKTGAAGSLMDVLHYP
GMNHRVEITEGILADECAALLCTFFRMPRQVFNAQKKAQSSTD [symbol] [symbol]
EIGKATAKYFFYSNIMNFFKTEITLANGEIRKRPLIETNGETGEIVWDK
GRDFATVRKVLSMPQVNIVKKTEVQTGGFSKESILPKRNSDKLIARKKDWDPKKYGGFMQPT
VAYSVLVVAKVEKGKSKKLKSVKELLGITIMERSSFEKNPIDFLEAKGYKEVKKDLIIKLPK
YSLFELENGRKRMLASAKFLQKGNELALPSKYVNFLYLASHYEKLKGSPEDNEQKQLFVEQH
KHYLDEIIEQISEFSKRVILADANLDKVLSAYNKHRDKPIREQAENIIHLFTLTNLGAPRAF
KYFDTTIARKEYRSTKEVLDATLIHQSITGLYETRIDLSQLGGD [symbol] [symbol]
DKKYSIGLAIGTNSVGWAVITDEYKVPSKKFKVLGNTDRHSIKKNLIGALLFDSGETAE
ATRLKRTARRRYTRRKNRICYLQEIFSNEMAKVDDSFFHRLEESFLVEEDKKHERHPIFGNI
VDEVAYHEKYPTIYHLRKKLVDSTDKADLRLIYLALAHMIKFRGHFLIEGDLNPDNSDVDKL
FIQLVQTYNQLFEENPINASGVDAKAILSARLSKSRRLENLIAQLPGEKKNGLFGNLIALSL
GLTPNFKSNFDLAEDAKLQLSKDTYDDDLDNLLAQIGDQYADLFLAAKNLSDAILLSDILRV
NTEITKAPLSASMIKRYDEHHQDLTLLKALVRQQLPEKYKEIFFDQSKNGYAGYIDGGASQE
EFYKFIKPILEKMDGTEELLVKLNREDLLRKQRTFDNGSIPHQIHLGELHAILRRQEDFYPF
LKDNREKIEKILTFRIPYYVGPLARGNSRFAWMTRKSEETITPWNFEEVVDKGASAQSFIER
MTNFDKNLPNEKVLPKHSLLYEYFTVYNELTKVKYVTEGMRKPAFLSGEQKKAIVDLLFKTN
RKVTVKQLKEDYFKKIECFDSVEISGVEDRFNASLGTYHDLLKIIKDKDFLDNEENEDILED
IVLTLTLFEDREMIEERLKTYAHLFDDKVMKQLKRRRYTGWGRLSRKLINGIRDKQSGKTIL
DFLKSDGFANRNFMQLIHDDSLTFKEDIQKAQVSGQGDSLHEHIANLAGSPAIKKGILQTVK
VVDELVKVMGRHKPENIVIEMARENQTTQKGQKNSRERMKRIEEGIKELGSQILKEHPVENT
QLQNEKLYLYYLQNGRDMYVDQELDINRLSDYDVDHIVPQSFLKDDSIDNKVLTRSDKNRGK
SDNVPSEEVVKKMKNYWRQLLNAKLITQRKFDNLTKAERGGLSELDKAGFIKRQLVETRQIT
KHVAQILDSRMNTKYDENDKLIREVKVITLKSKLVSDFRKDFQFYKVREINNYHHAHDAYLN
AVVGTALIKKYPKLESEFVYGDYKVYDVRKMIAKSEQEGADKRTADGSEFESPKKKRKV*
pNMG-B335 ABE8.1_Y147T_CP5_NGC PAM_monomer
MSEVEFSHEYWMRHALTLAKRARDEREVPVGAVLVLNNRVIGEGWNRAIGLHDPTAHAEIMA
LRQGGLVMQNYRLIDATLYVTFEPCVMCAGAMIHSRIGRVVFGVRNAKTGAAGSLMDVLHYP
GMNHRVEITEGILADECAALLCTFFRMPRQVFNAQKKAQSSTDSGGSSGGSSGSETPGTSES
ATPESSGGSSGGSEIGKATAKYFFYSNIMNFFKTEITLANGEIRKRPLIETNGETGEIVWDK
GRDFATVRKVLSMPQVNIVKKTEVQTGGFSKESILPKRNSDKLIARKKDWDPKKYGGFMQPT
VAYSVLVVAKVEKGKSKKLKSVKELLGITIMERSSFEKNPIDFLEAKGYKEVKKDLIIKLPK
YSLFELENGRKRMLASAKFLQKGNELALPSKYVNFLYLASHYEKLKGSPEDNEQKQLFVEQH
KHYLDEIIEQISEFSKRVILADANLDKVLSAYNKHRDKPIREQAENIIHLFTLTNLGAPRAF
KYFDTTIARKEYRSTKEVLDATLIHQSITGLYETRIDLSQLGGDGGSGGSGGSGGSGGSGGS
GGMDKKYSIGLAIGTNSVGWAVITDEYKVPSKKFKVLGNTDRHSIKKNLIGALLFDSGETAE
ATRLKRTARRRYTRRKNRICYLQEIFSNEMAKVDDSFFHRLEESFLVEEDKKHERHPIFGNI
VDEVAYHEKYPTIYHLRKKLVDSTDKADLRLIYLALAHMIKFRGHFLIEGDLNPDNSDVDKL
FIQLVQTYNQLFEENPINASGVDAKAILSARLSKSRRLENLIAQLPGEKKNGLFGNLIALSL
GLTPNFKSNFDLAEDAKLQLSKDTYDDDLDNLLAQIGDQYADLFLAAKNLSDAILLSDILRV
NTEITKAPLSASMIKRYDEHHQDLTLLKALVRQQLPEKYKEIFFDQSKNGYAGYIDGGASQE
EFYKFIKPILEKMDGTEELLVKLNREDLLRKQRTFDNGSIPHQIHLGELHAILRRQEDFYPF
LKDNREKIEKILTFRIPYYVGPLARGNSRFAWMTRKSEETITPWNFEEVVDKGASAQSFIER
MTNFDKNLPNEKVLPKHSLLYEYFTVYNELTKVKYVTEGMRKPAFLSGEQKKAIVDLLFKTN
RKVTVKQLKEDYFKKIECFDSVEISGVEDRFNASLGTYHDLLKIIKDKDFLDNEENEDILED
IVLTLTLFEDREMIEERLKTYAHLFDDKVMKQLKRRRYTGWGRLSRKLINGIRDKQSGKTIL
DFLKSDGFANRNFMQLIHDDSLTFKEDIQKAQVSGQGDSLHEHIANLAGSPAIKKGILQTVK
VVDELVKVMGRHKPENIVIEMARENQTTQKGQKNSRERMKRIEEGIKELGSQILKEHPVENT
QLQNEKLYLYYLQNGRDMYVDQELDINRLSDYDVDHIVPQSFLKDDSIDNKVLTRSDKNRGK
SDNVPSEEVVKKMKNYWRQLLNAKLITQRKFDNLTKAERGGLSELDKAGFIKRQLVETRQIT
KHVAQILDSRMNTKYDENDKLIREVKVITLKSKLVSDFRKDFQFYKVREINNYHHAHDAYLN
AVVGTALIKKYPKLESEFVYGDYKVYDVRKMIAKSEQEGADKRTADGSEFESPKKKRKV*
pNMG-357_ABE8.14 with NGC PAM CP5
MSEVEFSHEYWMRHALTLAKRAWDEREVPVGAVLVHNNRVIGEGWNRPIGRHDPTAHAEIMA
LRQGGLVMQNYRLIDATLYVTLEPCVMCAGAMIHSRIGRVVFGARDAKTGAAGSLMDVLHHP
GMNHRVEITEGILADECAALLSDFFRMRRQEIKAQKKAQSSTDGGSSGGSSGSETPGTSESA
TPESSGGSSGGSMSEVEFSHEYWMRHALTLAKRARDEREVPVGAVLVLNNRVIGEGWNRAIG
LHDPTAHAEIMALRQGGLVMQNYRLIDATLYVTFEPCVMCAGAMIHSRIGRVVFGVRNAKTG
AAGSLMDVLHYPGMNHRVEITEGILADECAALLCTFFRMPRQVFNAQKKAQSSTDSGGSSGG
SSGSETPGTSESATPESSGGSSGGS
EIGKATAKYFFYSNIMNFFKTEITLANGEIRKRPLIETNGETGEIVWDKGRDFATVRKVLSM
PQVNIVKKTEVQTGGFSKESILPKRNSDKLIARKKDWDPKKYGGFMQPTVAYSVLVVAKVEK
GKSKKLKSVKELLGITIMERSSFEKNPIDFLEAKGYKEVKKDLIIKLPKYSLFELENGRKRM
LASAKFLQKGNELALPSKYVNFLYLASHYEKLKGSPEDNEQKQLFVEQHKHYLDEIIEQISE
FSKRVILADANLDKVLSAYNKHRDKPIREQAENIIHLFTLTNLGAPRAFKYFDTTIARKEYR
STKEVLDATLIHQSITGLYETRIDLSQLGGDGGSGGSGGSGGSGGSGGSGGMDKKYSIGLAI
GTNSVGWAVITDEYKVPSKKFKVLGNTDRHSIKKNLIGALLFDSGETAEATRLKRTARRRYT
RRKNRICYLQEIFSNEMAKVDDSFFHRLEESFLVEEDKKHERHPIFGNIVDEVAYHEKYPTI
YHLRKKLVDSTDKADLRLIYLALAHMIKFRGHFLIEGDLNPDNSDVDKLFIQLVQTYNQLFE
ENPINASGVDAKAILSARLSKSRRLENLIAQLPGEKKNGLFGNLIALSLGLTPNFKSNFDLA
EDAKLQLSKDTYDDDLDNLLAQIGDQYADLFLAAKNLSDAILLSDILRVNTEITKAPLSASM
IKRYDEHHQDLTLLKALVRQQLPEKYKEIFFDQSKNGYAGYIDGGASQEEFYKFIKPILEKM
DGTEELLVKLNREDLLRKQRTFDNGSIPHQIHLGELHAILRRQEDFYPFLKDNREKIEKILT
FRIPYYVGPLARGNSRFAWMTRKSEETITPWNFEEVVDKGASAQSFIERMTNFDKNLPNEKV
LPKHSLLYEYFTVYNELTKVKYVTEGMRKPAFLSGEQKKAIVDLLFKTNRKVTVKQLKEDYF
KKIECFDSVEISGVEDRFNASLGTYHDLLKIIKDKDFLDNEENEDILEDIVLTLTLFEDREM
IEERLKTYAHLFDDKVMKQLKRRRYTGWGRLSRKLINGIRDKQSGKTILDFLKSDGFANRNF
MQLIHDDSLTFKEDIQKAQVSGQGDSLHEHIANLAGSPAIKKGILQTVKVVDELVKVMGRHK
PENIVIEMARENQTTQKGQKNSRERMKRIEEGIKELGSQILKEHPVENTQLQNEKLYLYYLQ
NGRDMYVDQELDINRLSDYDVDHIVPQSFLKDDSIDNKVLTRSDKNRGKSDNVPSEEVVKKM
KNYWRQLLNAKLITQRKFDNLTKAERGGLSELDKAGFIKRQLVETRQITKHVAQILDSRMNT
KYDENDKLIREVKVITLKSKLVSDFRKDFQFYKVREINNYHHAHDAYLNAVVGTALIKKYPK
LESEFVYGDYKVYDVRKMIAKSEQEGADKRTADGSEFESPKKKRKV*
ABE8.8-m
MSEVEFSHEYWMRHALTLAKRARDEREVPVGAVLVLNNRVIGEGWNRAIGLHDPTAHAEIMA
LRQGGLVMQNYRLIDATLYVTFEPCVMCAGAMIHSRIGRVVFGVRNAKTGAAGSLMDVLHHP
GMNHRVEITEGILADECAALLCRFFRMPRRVFNAQKKAQSSTDSGGSSGGSSGSETPGTSES
ATPESSGGSSGGSDKKYSIGL [symbol] IGTNSVGWAVITDEYKVPSKKFKVLGNTDRHSIKKNLIGA
LLFDSGETAEATRLKRTARRRYTRRKNRICYLQEIFSNEMAKVDDSFFHRLEESFLVEEDKK
HERHPIFGNIVDEVAYHEKYPTIYHLRKKLVDSTDKADLRLIYLALAHMIKFRGHFLIEGDL
NPDNSDVDKLFIQLVQTYNQLFEENPINASGVDAKAILSARLSKSRRLENLIAQLPGEKKNG
LFGNLIALSLGLTPNFKSNFDLAEDAKLQLSKDTYDDDLDNLLAQIGDQYADLFLAAKNLSD
AILLSDILRVNTEITKAPLSASMIKRYDEHHQDLTLLKALVRQQLPEKYKEIFFDQSKNGYA
GYIDGGASQEEFYKFIKPILEKMDGTEELLVKLNREDLLRKQRTFDNGSIPHQIHLGELHAI
LRRQEDFYPFLKDNREKIEKILTFRIPYYVGPLARGNSRFAWMTRKSEETITPWNFEEVVDK
GASAQSFIERMTNFDKNLPNEKVLPKHSLLYEYFTVYNELTKVKYVTEGMRKPAFLSGEQKK
AIVDLLFKTNRKVTVKQLKEDYFKKIECFDSVEISGVEDRFNASLGTYHDLLKIIKDKDFLD
NEENEDILEDIVLTLTLFEDREMIEERLKTYAHLFDDKVMKQLKRRRYTGWGRLSRKLINGI
RDKQSGKTILDFLKSDGFANRNFMQLIHDDSLTFKEDIQKAQVSGQGDSLHEHIANLAGSPA
IKKGILQTVKVVDELVKVMGRHKPENIVIEMARENQTTQKGQKNSRERMKRIEEGIKELGSQ
ILKEHPVENTQLQNEKLYLYYLQNGRDMYVDQELDINRLSDYDVDHIVPQSFLKDDSIDNKV
LTRSDKNRGKSDNVPSEEVVKKMKNYWRQLLNAKLITQRKFDNLTKAERGGLSELDKAGFIK
RQLVETRQITKHVAQILDSRMNTKYDENDKLIREVKVITLKSKLVSDFRKDFQFYKVREINN
YHHAHDAYLNAVVGTALIKKYPKLESEFVYGDYKVYDVRKMIAKSEQEIGKATAKYFFYSNI
MNFFKTEITLANGEIRKRPLIETNGETGEIVWDKGRDFATVRKVLSMPQVNIVKKTEVQTGG
FSKESILPKRNSDKLIARKKDWDPKKYGGFDSPTVAYSVLVVAKVEKGKSKKLKSVKELLGI
TIMERSSFEKNPIDFLEAKGYKEVKKDLIIKLPKYSLFELENGRKRMLASAGELQKGNELAL
PSKYVNFLYLASHYEKLKGSPEDNEQKQLFVEQHKHYLDEIIEQISEFSKRVILADANLDKV
LSAYNKHRDKPIREQAENIIHLFTLTNLGAPAAFKYFDTTIDRKRYTSTKEVLDATLIHQSI
TGLYETRIDLSQLGGDEGADKRTADGSEFESPKKKRKV*
ABE8.8-d
MSEVEFSHEYWMRHALTLAKRAWDEREVPVGAVLVHNNRVIGEGWNRPIGRHDPTAHAEIMA
LRQGGLVMQNYRLIDATLYVTLEPCVMCAGAMIHSRIGRVVFGARDAKTGAAGSLMDVLHHP
GMNHRVEITEGILADECAALLSDFFRMRRQEIKAQKKAQSSTDSGGSSGGSSGSETPGTSES
ATPESSGGSSGGSSEVEFSHEYWMRHALTLAKRARDEREVPVGAVLVLNNRVIGEGWNRAIG
LHDPTAHAEIMALRQGGLVMQNYRLIDATLYVTFEPCVMCAGAMIHSRIGRVVFGVRNAKTG
AAGSLMDVLHHPGMNHRVEITEGILADECAALLCRFFRMPRRVFNAQKKAQSSTDSGGSSGG
SSGSETPGTSESATPESSGGSSGGSDKKYSIGL [symbol] IGTNSVGWAVITDEYKVPSKKFKVLGNT
DRHSIKKNLIGALLFDSGETAEATRLKRTARRRYTRRKNRICYLQEIFSNEMAKVDDSFFHR
LEESFLVEEDKKHERHPIFGNIVDEVAYHEKYPTIYHLRKKLVDSTDKADLRLIYLALAHMI
KFRGHFLIEGDLNPDNSDVDKLFIQLVQTYNQLFEENPINASGVDAKAILSARLSKSRRLEN
LIAQLPGEKKNGLFGNLIALSLGLTPNFKSNFDLAEDAKLQLSKDTYDDDLDNLLAQIGDQY
ADLFLAAKNLSDAILLSDILRVNTEITKAPLSASMIKRYDEHHQDLTLLKALVRQQLPEKYK
EIFFDQSKNGYAGYIDGGASQEEFYKFIKPILEKMDGTEELLVKLNREDLLRKQRTFDNGSI
PHQIHLGELHAILRRQEDFYPFLKDNREKIEKILTFRIPYYVGPLARGNSRFAWMTRKSEET
ITPWNFEEVVDKGASAQSFIERMTNFDKNLPNEKVLPKHSLLYEYFTVYNELTKVKYVTEGM
RKPAFLSGEQKKAIVDLLFKTNRKVTVKQLKEDYFKKIECFDSVEISGVEDRFNASLGTYHD
LLKIIKDKDFLDNEENEDILEDIVLTLTLFEDREMIEERLKTYAHLFDDKVMKQLKRRRYTG
WGRLSRKLINGIRDKQSGKTILDFLKSDGFANRNFMQLIHDDSLTFKEDIQKAQVSGQGDSL
HEHIANLAGSPAIKKGILQTVKVVDELVKVMGRHKPENIVIEMARENQTTQKGQKNSRERMK
RIEEGIKELGSQILKEHPVENTQLQNEKLYLYYLQNGRDMYVDQELDINRLSDYDVDHIVPQ
SFLKDDSIDNKVLTRSDKNRGKSDNVPSEEVVKKMKNYWRQLLNAKLITQRKFDNLTKAERG
GLSELDKAGFIKRQLVETRQITKHVAQILDSRMNTKYDENDKLIREVKVITLKSKLVSDFRK
DFQFYKVREINNYHHAHDAYLNAVVGTALIKKYPKLESEFVYGDYKVYDVRKMIAKSEQEIG
KATAKYFFYSNIMNFFKTEITLANGEIRKRPLIETNGETGEIVWDKGRDFATVRKVLSMPQV
NIVKKTEVQTGGFSKESILPKRNSDKLIARKKDWDPKKYGGFDSPTVAYSVLVVAKVEKGKS
KKLKSVKELLGITIMERSSFEKNPIDFLEAKGYKEVKKDLIIKLPKYSLFELENGRKRMLAS
AGELQKGNELALPSKYVNFLYLASHYEKLKGSPEDNEQKQLFVEQHKHYLDEIIEQISEFSK
RVILADANLDKVLSAYNKHRDKPIREQAENIIHLFTLTNLGAPAAFKYFDTTIDRKRYTSTK
EVLDATLIHQSITGLYETRIDLSQLGGDEGADKRTADGSEFESPKKKRKV*
ABE8.13-m
MSEVEFSHEYWMRHALTLAKRARDEREVPVGAVLVLNNRVIGEGWNRAIGLHDPTAHAEIMA
LRQGGLVMQNYRLYDATLYVTFEPCVMCAGAMIHSRIGRVVFGVRNAKTGAAGSLMDVLHHP
GMNHRVEITEGILADECAALLCRFFRMPRRVFNAQKKAQSSTDSGGSSGGSSGSETPGTSES
ATPESSGGSSGGSDKKYSIGL [symbol] IGTNSVGWAVITDEYKVPSKKFKVLGNTDRHSIKKNLIGA
LLFDSGETAEATRLKRTARRRYTRRKNRICYLQEIFSNEMAKVDDSFFHRLEESFLVEEDKK
HERHPIFGNIVDEVAYHEKYPTIYHLRKKLVDSTDKADLRLIYLALAHMIKFRGHFLIEGDL
NPDNSDVDKLFIQLVQTYNQLFEENPINASGVDAKAILSARLSKSRRLENLIAQLPGEKKNG
LFGNLIALSLGLTPNFKSNFDLAEDAKLQLSKDTYDDDLDNLLAQIGDQYADLFLAAKNLSD
AILLSDILRVNTEITKAPLSASMIKRYDEHHQDLTLLKALVRQQLPEKYKEIFFDQSKNGYA
GYIDGGASQEEFYKFIKPILEKMDGTEELLVKLNREDLLRKQRTFDNGSIPHQIHLGELHAI
LRRQEDFYPFLKDNREKIEKILTFRIPYYVGPLARGNSRFAWMTRKSEETITPWNFEEVVDK
GASAQSFIERMTNFDKNLPNEKVLPKHSLLYEYFTVYNELTKVKYVTEGMRKPAFLSGEQKK
AIVDLLFKTNRKVTVKQLKEDYFKKIECFDSVEISGVEDRFNASLGTYHDLLKIIKDKDFLD
NEENEDILEDIVLTLTLFEDREMIEERLKTYAHLFDDKVMKQLKRRRYTGWGRLSRKLINGI
RDKQSGKTILDFLKSDGFANRNFMQLIHDDSLTFKEDIQKAQVSGQGDSLHEHIANLAGSPA
IKKGILQTVKVVDELVKVMGRHKPENIVIEMARENQTTQKGQKNSRERMKRIEEGIKELGSQ
ILKEHPVENTQLQNEKLYLYYLQNGRDMYVDQELDINRLSDYDVDHIVPQSFLKDDSIDNKV
LTRSDKNRGKSDNVPSEEVVKKMKNYWRQLLNAKLITQRKFDNLTKAERGGLSELDKAGFIK
RQLVETRQITKHVAQILDSRMNTKYDENDKLIREVKVITLKSKLVSDFRKDFQFYKVREINN
YHHAHDAYLNAVVGTALIKKYPKLESEFVYGDYKVYDVRKMIAKSEQEIGKATAKYFFYSNI
MNFFKTEITLANGEIRKRPLIETNGETGEIVWDKGRDFATVRKVLSMPQVNIVKKTEVQTGG
FSKESILPKRNSDKLIARKKDWDPKKYGGFDSPTVAYSVLVVAKVEKGKSKKLKSVKELLGI
TIMERSSFEKNPIDFLEAKGYKEVKKDLIIKLPKYSLFELENGRKRMLASAGELQKGNELAL
PSKYVNFLYLASHYEKLKGSPEDNEQKQLFVEQHKHYLDEIIEQISEFSKRVILADANLDKV
LSAYNKHRDKPIREQAENIIHLFTLTNLGAPAAFKYFDTTIDRKRYTSTKEVLDATLIHQSI
TGLYETRIDLSQLGGDEGADKRTADGSEFESPKKKRKV*
ABE8.13-d
MSEVEFSHEYWMRHALTLAKRAWDEREVPVGAVLVHNNRVIGEGWNRPIGRHDPTAHAEIMA
LRQGGLVMQNYRLIDATLYVTLEPCVMCAGAMIHSRIGRVVFGARDAKTGAAGSLMDVLHHP
GMNHRVEITEGILADECAALLSDFFRMRRQEIKAQKKAQSSTDSGGSSGGSSGSETPGTSES
ATPESSGGSSGGSSEVEFSHEYWMRHALTLAKRARDEREVPVGAVLVLNNRVIGEGWNRAIG
LHDPTAHAEIMALRQGGLVMQNYRLYDATLYVTFEPCVMCAGAMIHSRIGRVVFGVRNAKTG
AAGSLMDVLHHPGMNHRVEITEGILADECAALLCRFFRMPRRVFNAQKKAQSSTDSGGSSGG
SSGSETPGTSESATPESSGGSSGGSDKKYSIGL [symbol] IGTNSVGWAVITDEYKVPSKKFKVLGNT
DRHSIKKNLIGALLFDSGETAEATRLKRTARRRYTRRKNRICYLQEIFSNEMAKVDDSFFHR
LEESFLVEEDKKHERHPIFGNIVDEVAYHEKYPTIYHLRKKLVDSTDKADLRLIYLALAHMI
KFRGHFLIEGDLNPDNSDVDKLFIQLVQTYNQLFEENPINASGVDAKAILSARLSKSRRLEN
LIAQLPGEKKNGLFGNLIALSLGLTPNFKSNFDLAEDAKLQLSKDTYDDDLDNLLAQIGDQY
ADLFLAAKNLSDAILLSDILRVNTEITKAPLSASMIKRYDEHHQDLTLLKALVRQQLPEKYK
EIFFDQSKNGYAGYIDGGASQEEFYKFIKPILEKMDGTEELLVKLNREDLLRKQRTFDNGSI
PHQIHLGELHAILRRQEDFYPFLKDNREKIEKILTFRIPYYVGPLARGNSRFAWMTRKSEET
ITPWNFEEVVDKGASAQSFIERMTNFDKNLPNEKVLPKHSLLYEYFTVYNELTKVKYVTEGM
RKPAFLSGEQKKAIVDLLFKTNRKVTVKQLKEDYFKKIECFDSVEISGVEDRFNASLGTYHD
LLKIIKDKDFLDNEENEDILEDIVLTLTLFEDREMIEERLKTYAHLFDDKVMKQLKRRRYTG
WGRLSRKLINGIRDKQSGKTILDFLKSDGFANRNFMQLIHDDSLTFKEDIQKAQVSGQGDSL
HEHIANLAGSPAIKKGILQTVKVVDELVKVMGRHKPENIVIEMARENQTTQKGQKNSRERMK
RIEEGIKELGSQILKEHPVENTQLQNEKLYLYYLQNGRDMYVDQELDINRLSDYDVDHIVPQ
SFLKDDSIDNKVLTRSDKNRGKSDNVPSEEVVKKMKNYWRQLLNAKLITQRKFDNLTKAERG
GLSELDKAGFIKRQLVETRQITKHVAQILDSRMNTKYDENDKLIREVKVITLKSKLVSDFRK
DFQFYKVREINNYHHAHDAYLNAVVGTALIKKYPKLESEFVYGDYKVYDVRKMIAKSEQEIG
KATAKYFFYSNIMNFFKTEITLANGEIRKRPLIETNGETGEIVWDKGRDFATVRKVLSMPQV
NIVKKTEVQTGGFSKESILPKRNSDKLIARKKDWDPKKYGGFDSPTVAYSVLVVAKVEKGKS
KKLKSVKELLGITIMERSSFEKNPIDFLEAKGYKEVKKDLIIKLPKYSLFELENGRKRMLAS
AGELQKGNELALPSKYVNFLYLASHYEKLKGSPEDNEQKQLFVEQHKHYLDEIIEQISEFSK
RVILADANLDKVLSAYNKHRDKPIREQAENIIHLFTLTNLGAPAAFKYFDTTIDRKRYTSTK
EVLDATLIHQSITGLYETRIDLSQLGGDEGADKRTADGSEFESPKKKRKV*
ABE8.17-m
MSEVEFSHEYWMRHALTLAKRARDEREVPVGAVLVLNNRVIGEGWNRAIGLHDPTAHAEIMA
LRQGGLVMQNYRLIDATLYSTFEPCVMCAGAMIHSRIGRVVFGVRNAKTGAAGSLMDVLHYP
GMNHRVEITEGILADECAALLCYFFRMPRRVFNAQKKAQSSTDSGGSSGGSSGSETPGTSES
ATPESSGGSSGGSDKKYSIGL [symbol] IGTNSVGWAVITDEYKVPSKKFKVLGNTDRHSIKKNLIGA
LLFDSGETAEATRLKRTARRRYTRRKNRICYLQEIFSNEMAKVDDSFFHRLEESFLVEEDKK
HERHPIFGNIVDEVAYHEKYPTIYHLRKKLVDSTDKADLRLIYLALAHMIKFRGHFLIEGDL
NPDNSDVDKLFIQLVQTYNQLFEENPINASGVDAKAILSARLSKSRRLENLIAQLPGEKKNG
LFGNLIALSLGLTPNFKSNFDLAEDAKLQLSKDTYDDDLDNLLAQIGDQYADLFLAAKNLSD
AILLSDILRVNTEITKAPLSASMIKRYDEHHQDLTLLKALVRQQLPEKYKEIFFDQSKNGYA
GYIDGGASQEEFYKFIKPILEKMDGTEELLVKLNREDLLRKQRTFDNGSIPHQIHLGELHAI
LRRQEDFYPFLKDNREKIEKILTFRIPYYVGPLARGNSRFAWMTRKSEETITPWNFEEVVDK
GASAQSFIERMTNFDKNLPNEKVLPKHSLLYEYFTVYNELTKVKYVTEGMRKPAFLSGEQKK
AIVDLLFKTNRKVTVKQLKEDYFKKIECFDSVEISGVEDRFNASLGTYHDLLKIIKDKDFLD
NEENEDILEDIVLTLTLFEDREMIEERLKTYAHLFDDKVMKQLKRRRYTGWGRLSRKLINGI
RDKQSGKTILDFLKSDGFANRNFMQLIHDDSLTFKEDIQKAQVSGQGDSLHEHIANLAGSPA
IKKGILQTVKVVDELVKVMGRHKPENIVIEMARENQTTQKGQKNSRERMKRIEEGIKELGSQ
ILKEHPVENTQLQNEKLYLYYLQNGRDMYVDQELDINRLSDYDVDHIVPQSFLKDDSIDNKV
LTRSDKNRGKSDNVPSEEVVKKMKNYWRQLLNAKLITQRKFDNLTKAERGGLSELDKAGFIK
RQLVETRQITKHVAQILDSRMNTKYDENDKLIREVKVITLKSKLVSDFRKDFQFYKVREINN
YHHAHDAYLNAVVGTALIKKYPKLESEFVYGDYKVYDVRKMIAKSEQEIGKATAKYFFYSNI
MNFFKTEITLANGEIRKRPLIETNGETGEIVWDKGRDFATVRKVLSMPQVNIVKKTEVQTGG
FSKESILPKRNSDKLIARKKDWDPKKYGGFDSPTVAYSVLVVAKVEKGKSKKLKSVKELLGI
TIMERSSFEKNPIDFLEAKGYKEVKKDLIIKLPKYSLFELENGRKRMLASAGELQKGNELAL
PSKYVNFLYLASHYEKLKGSPEDNEQKQLFVEQHKHYLDEIIEQISEFSKRVILADANLDKV
LSAYNKHRDKPIREQAENIIHLFTLTNLGAPAAFKYFDTTIDRKRYTSTKEVLDATLIHQSI
TGLYETRIDLSQLGGDEGADKRTADGSEFESPKKKRKV*
ABE8.17-d
MSEVEFSHEYWMRHALTLAKRAWDEREVPVGAVLVHNNRVIGEGWNRPIGRHDPTAHAEIMA
LRQGGLVMQNYRLIDATLYVTLEPCVMCAGAMIHSRIGRVVFGARDAKTGAAGSLMDVLHHP
GMNHRVEITEGILADECAALLSDFFRMRRQEIKAQKKAQSSTDSGGSSGGSSGSETPGTSES
ATPESSGGSSGGSSEVEFSHEYWMRHALTLAKRARDEREVPVGAVLVLNNRVIGEGWNRAIG
LHDPTAHAEIMALRQGGLVMQNYRLIDATLYSTFEPCVMCAGAMIHSRIGRVVFGVRNAKTG
AAGSLMDVLHYPGMNHRVEITEGILADECAALLCYFFRMPRRVFNAQKKAQSSTDSGGSSGG
SSGSETPGTSESATPESSGGSSGGSDKKYSIGL [symbol] IGTNSVGWAVITDEYKVPSKKFKVLGNT
DRHSIKKNLIGALLFDSGETAEATRLKRTARRRYTRRKNRICYLQEIFSNEMAKVDDSFFHR
LEESFLVEEDKKHERHPIFGNIVDEVAYHEKYPTIYHLRKKLVDSTDKADLRLIYLALAHMI
KFRGHFLIEGDLNPDNSDVDKLFIQLVQTYNQLFEENPINASGVDAKAILSARLSKSRRLEN
LIAQLPGEKKNGLFGNLIALSLGLTPNFKSNFDLAEDAKLQLSKDTYDDDLDNLLAQIGDQY
ADLFLAAKNLSDAILLSDILRVNTEITKAPLSASMIKRYDEHHQDLTLLKALVRQQLPEKYK
EIFFDQSKNGYAGYIDGGASQEEFYKFIKPILEKMDGTEELLVKLNREDLLRKQRTFDNGSI
PHQIHLGELHAILRRQEDFYPFLKDNREKIEKILTFRIPYYVGPLARGNSRFAWMTRKSEET
ITPWNFEEVVDKGASAQSFIERMTNFDKNLPNEKVLPKHSLLYEYFTVYNELTKVKYVTEGM
RKPAFLSGEQKKAIVDLLFKTNRKVTVKQLKEDYFKKIECFDSVEISGVEDRFNASLGTYHD
LLKIIKDKDFLDNEENEDILEDIVLTLTLFEDREMIEERLKTYAHLFDDKVMKQLKRRRYTG
WGRLSRKLINGIRDKQSGKTILDFLKSDGFANRNFMQLIHDDSLTFKEDIQKAQVSGQGDSL
HEHIANLAGSPAIKKGILQTVKVVDELVKVMGRHKPENIVIEMARENQTTQKGQKNSRERMK
RIEEGIKELGSQILKEHPVENTQLQNEKLYLYYLQNGRDMYVDQELDINRLSDYDVDHIVPQ
SFLKDDSIDNKVLTRSDKNRGKSDNVPSEEVVKKMKNYWRQLLNAKLITQRKFDNLTKAERG
GLSELDKAGFIKRQLVETRQITKHVAQILDSRMNTKYDENDKLIREVKVITLKSKLVSDFRK
DFQFYKVREINNYHHAHDAYLNAVVGTALIKKYPKLESEFVYGDYKVYDVRKMIAKSEQEIG
KATAKYFFYSNIMNFFKTEITLANGEIRKRPLIETNGETGEIVWDKGRDFATVRKVLSMPQV
NIVKKTEVQTGGFSKESILPKRNSDKLIARKKDWDPKKYGGFDSPTVAYSVLVVAKVEKGKS
KKLKSVKELLGITIMERSSFEKNPIDFLEAKGYKEVKKDLIIKLPKYSLFELENGRKRMLAS
AGELQKGNELALPSKYVNFLYLASHYEKLKGSPEDNEQKQLFVEQHKHYLDEIIEQISEFSK
RVILADANLDKVLSAYNKHRDKPIREQAENIIHLFTLTNLGAPAAFKYFDTTIDRKRYTSTK
EVLDATLIHQSITGLYETRIDLSQLGGDEGADKRTADGSEFESPKKKRKV*
ABE8.20-m
MSEVEFSHEYWMRHALTLAKRARDEREVPVGAVLVLNNRVIGEGWNRAIGLHDPTAHAEIMA
LRQGGLVMQNYRLYDATLYSTFEPCVMCAGAMIHSRIGRVVFGVRNAKTGAAGSLMDVLHHP
GMNHRVEITEGILADECAALLCRFFRMPRRVFNAQKKAQSSTDSGGSSGGSSGSETPGTSES
ATPESSGGSSGGSDKKYSIGL [symbol] IGTNSVGWAVITDEYKVPSKKFKVLGNTDRHSIKKNLIGA
LLFDSGETAEATRLKRTARRRYTRRKNRICYLQEIFSNEMAKVDDSFFHRLEESFLVEEDKK
HERHPIFGNIVDEVAYHEKYPTIYHLRKKLVDSTDKADLRLIYLALAHMIKFRGHFLIEGDL
NPDNSDVDKLFIQLVQTYNQLFEENPINASGVDAKAILSARLSKSRRLENLIAQLPGEKKNG
LFGNLIALSLGLTPNFKSNFDLAEDAKLQLSKDTYDDDLDNLLAQIGDQYADLFLAAKNLSD
AILLSDILRVNTEITKAPLSASMIKRYDEHHQDLTLLKALVRQQLPEKYKEIFFDQSKNGYA
GYIDGGASQEEFYKFIKPILEKMDGTEELLVKLNREDLLRKQRTFDNGSIPHQIHLGELHAI
LRRQEDFYPFLKDNREKIEKILTFRIPYYVGPLARGNSRFAWMTRKSEETITPWNFEEVVDK
GASAQSFIERMTNFDKNLPNEKVLPKHSLLYEYFTVYNELTKVKYVTEGMRKPAFLSGEQKK
AIVDLLFKTNRKVTVKQLKEDYFKKIECFDSVEISGVEDRFNASLGTYHDLLKIIKDKDFLD
NEENEDILEDIVLTLTLFEDREMIEERLKTYAHLFDDKVMKQLKRRRYTGWGRLSRKLINGI
RDKQSGKTILDFLKSDGFANRNFMQLIHDDSLTFKEDIQKAQVSGQGDSLHEHIANLAGSPA
IKKGILQTVKVVDELVKVMGRHKPENIVIEMARENQTTQKGQKNSRERMKRIEEGIKELGSQ
ILKEHPVENTQLQNEKLYLYYLQNGRDMYVDQELDINRLSDYDVDHIVPQSFLKDDSIDNKV
LTRSDKNRGKSDNVPSEEVVKKMKNYWRQLLNAKLITQRKFDNLTKAERGGLSELDKAGFIK
RQLVETRQITKHVAQILDSRMNTKYDENDKLIREVKVITLKSKLVSDFRKDFQFYKVREINN
YHHAHDAYLNAVVGTALIKKYPKLESEFVYGDYKVYDVRKMIAKSEQEIGKATAKYFFYSNI
MNFFKTEITLANGEIRKRPLIETNGETGEIVWDKGRDFATVRKVLSMPQVNIVKKTEVQTGG
FSKESILPKRNSDKLIARKKDWDPKKYGGFDSPTVAYSVLVVAKVEKGKSKKLKSVKELLGI
TIMERSSFEKNPIDFLEAKGYKEVKKDLIIKLPKYSLFELENGRKRMLASAGELQKGNELAL
PSKYVNFLYLASHYEKLKGSPEDNEQKQLFVEQHKHYLDEIIEQISEFSKRVILADANLDKV
LSAYNKHRDKPIREQAENIIHLFTLTNLGAPAAFKYFDTTIDRKRYTSTKEVLDATLIHQSI
TGLYETRIDLSQLGGDEGADKRTADGSEFESPKKKRKV*
ABE8.20-d
MSEVEFSHEYWMRHALTLAKRAWDEREVPVGAVLVHNNRVIGEGWNRPIGRHDPTAHAEIMA
LRQGGLVMQNYRLIDATLYVTLEPCVMCAGAMIHSRIGRVVFGARDAKTGAAGSLMDVLHHP
GMNHRVEITEGILADECAALLSDFFRMRRQEIKAQKKAQSSTDSGGSSGGSSGSETPGTSES
ATPESSGGSSGGSSEVEFSHEYWMRHALTLAKRARDEREVPVGAVLVLNNRVIGEGWNRAIG
LHDPTAHAEIMALRQGGLVMQNYRLYDATLYSTFEPCVMCAGAMIHSRIGRVVFGVRNAKTG
AAGSLMDVLHHPGMNHRVEITEGILADECAALLCRFFRMPRRVFNAQKKAQSSTDSGGSSGG
SSGSETPGTSESATPESSGGSSGGSDKKYSIGL [symbol] IGTNSVGWAVITDEYKVPSKKFKVLGNT
DRHSIKKNLIGALLFDSGETAEATRLKRTARRRYTRRKNRICYLQEIFSNEMAKVDDSFFHR
LEESFLVEEDKKHERHPIFGNIVDEVAYHEKYPTIYHLRKKLVDSTDKADLRLIYLALAHMI
KFRGHFLIEGDLNPDNSDVDKLFIQLVQTYNQLFEENPINASGVDAKAILSARLSKSRRLEN
LIAQLPGEKKNGLFGNLIALSLGLTPNFKSNFDLAEDAKLQLSKDTYDDDLDNLLAQIGDQY
ADLFLAAKNLSDAILLSDILRVNTEITKAPLSASMIKRYDEHHQDLTLLKALVRQQLPEKYK
EIFFDQSKNGYAGYIDGGASQEEFYKFIKPILEKMDGTEELLVKLNREDLLRKQRTFDNGSI
PHQIHLGELHAILRRQEDFYPFLKDNREKIEKILTFRIPYYVGPLARGNSRFAWMTRKSEET
ITPWNFEEVVDKGASAQSFIERMTNFDKNLPNEKVLPKHSLLYEYFTVYNELTKVKYVTEGM
RKPAFLSGEQKKAIVDLLFKTNRKVTVKQLKEDYFKKIECFDSVEISGVEDRFNASLGTYHD
LLKIIKDKDFLDNEENEDILEDIVLTLTLFEDREMIEERLKTYAHLFDDKVMKQLKRRRYTG
WGRLSRKLINGIRDKQSGKTILDFLKSDGFANRNFMQLIHDDSLTFKEDIQKAQVSGQGDSL
HEHIANLAGSPAIKKGILQTVKVVDELVKVMGRHKPENIVIEMARENQTTQKGQKNSRERMK
RIEEGIKELGSQILKEHPVENTQLQNEKLYLYYLQNGRDMYVDQELDINRLSDYDVDHIVPQ
SFLKDDSIDNKVLTRSDKNRGKSDNVPSEEVVKKMKNYWRQLLNAKLITQRKFDNLTKAERG
GLSELDKAGFIKRQLVETRQITKHVAQILDSRMNTKYDENDKLIREVKVITLKSKLVSDFRK
DFQFYKVREINNYHHAHDAYLNAVVGTALIKKYPKLESEFVYGDYKVYDVRKMIAKSEQEIG
KATAKYFFYSNIMNFFKTEITLANGEIRKRPLIETNGETGEIVWDKGRDFATVRKVLSMPQV
NIVKKTEVQTGGFSKESILPKRNSDKLIARKKDWDPKKYGGFDSPTVAYSVLVVAKVEKGKS
KKLKSVKELLGITIMERSSFEKNPIDFLEAKGYKEVKKDLIIKLPKYSLFELENGRKRMLAS
AGELQKGNELALPSKYVNFLYLASHYEKLKGSPEDNEQKQLFVEQHKHYLDEIIEQISEFSK
RVILADANLDKVLSAYNKHRDKPIREQAENIIHLFTLTNLGAPAAFKYFDTTIDRKRYTSTK
EVLDATLIHQSITGLYETRIDLSQLGGDEGADKRTADGSEFESPKKKRKV*
01. monoABE8.1_bpNLS + Y147T
MSEVEFSHEYWMRHALTLAKRARDEREVPVGAVLVLNNRVIGEGWNRAIGLHDPTAHAEIMA
LRQGGLVMQNYRLIDATLYVTFEPCVMCAGAMIHSRIGRVVFGVRNAKTGAAGSLMDVLHYP
GMNHRVEITEGILADECAALLCTFFRMPRQVFNAQKKAQSSTDSGGSSGGSSGSETPGTSES
ATPESSGGSSGGSDKKYSIGLAIGTNSVGWAVITDEYKVPSKKFKVLGNTDRHSIKKNLIGA
LLFDSGETAEATRLKRTARRRYTRRKNRICYLQEIFSNEMAKVDDSFFHRLEESFLVEEDKK
HERHPIFGNIVDEVAYHEKYPTIYHLRKKLVDSTDKADLRLIYLALAHMIKFRGHFLIEGDL
NPDNSDVDKLFIQLVQTYNQLFEENPINASGVDAKAILSARLSKSRRLENLIAQLPGEKKNG
LFGNLIALSLGLTPNFKSNFDLAEDAKLQLSKDTYDDDLDNLLAQIGDQYADLFLAAKNLSD
AILLSDILRVNTEITKAPLSASMIKRYDEHHQDLTLLKALVRQQLPEKYKEIFFDQSKNGYA
GYIDGGASQEEFYKFIKPILEKMDGTEELLVKLNREDLLRKQRTFDNGSIPHQIHLGELHAI
LRRQEDFYPFLKDNREKIEKILTFRIPYYVGPLARGNSRFAWMTRKSEETITPWNFEEVVDK
GASAQSFIERMTNFDKNLPNEKVLPKHSLLYEYFTVYNELTKVKYVTEGMRKPAFLSGEQKK
AIVDLLFKTNRKVTVKQLKEDYFKKIECFDSVEISGVEDRFNASLGTYHDLLKIIKDKDFLD
NEENEDILEDIVLTLTLFEDREMIEERLKTYAHLFDDKVMKQLKRRRYTGWGRLSRKLINGI
RDKQSGKTILDFLKSDGFANRNFMQLIHDDSLTFKEDIQKAQVSGQGDSLHEHIANLAGSPA
IKKGILQTVKVVDELVKVMGRHKPENIVIEMARENQTTQKGQKNSRERMKRIEEGIKELGSQ
ILKEHPVENTQLQNEKLYLYYLQNGRDMYVDQELDINRLSDYDVDHIVPQSFLKDDSIDNKV
LTRSDKNRGKSDNVPSEEVVKKMKNYWRQLLNAKLITQRKFDNLTKAERGGLSELDKAGFIK
RQLVETRQITKHVAQILDSRMNTKYDENDKLIREVKVITLKSKLVSDFRKDFQFYKVREINN
YHHAHDAYLNAVVGTALIKKYPKLESEFVYGDYKVYDVRKMIAKSEQEIGKATAKYFFYSNI
MNFFKTEITLANGEIRKRPLIETNGETGEIVWDKGRDFATVRKVLSMPQVNIVKKTEVQTGG
FSKESILPKRNSDKLIARKKDWDPKKYGGFVSPTVAYSVLVVAKVEKGKSKKLKSVKELLGI
TIMERSSFEKNPIDFLEAKGYKEVKKDLIIKLPKYSLFELENGRKRMLASARELQKGNELAL
PSKYVNFLYLASHYEKLKGSPEDNEQKQLFVEQHKHYLDEIIEQISEFSKRVILADANLDKV
LSAYNKHRDKPIREQAENIIHLFTLTNLGAPAAFKYFDTTIDRKQYRSTKEVLDATLIHQSI
TGLYETRIDLSQLGGDEGADKRTADGSEFESPKKKRKV
02. monoABE8.1_bpNLS + Y147R
MSEVEFSHEYWMRHALTLAKRARDEREVPVGAVLVLNNRVIGEGWNRAIGLHDPTAHAEIMA
LRQGGLVMQNYRLIDATLYVTFEPCVMCAGAMIHSRIGRVVFGVRNAKTGAAGSLMDVLHYP
GMNHRVEITEGILADECAALLCRFFRMPRQVFNAQKKAQSSTDSGGSSGGSSGSETPGTSES
ATPESSGGSSGGSDKKYSIGLAIGTNSVGWAVITDEYKVPSKKFKVLGNTDRHSIKKNLIGA
LLFDSGETAEATRLKRTARRRYTRRKNRICYLQEIFSNEMAKVDDSFFHRLEESFLVEEDKK
HERHPIFGNIVDEVAYHEKYPTIYHLRKKLVDSTDKADLRLIYLALAHMIKFRGHFLIEGDL
NPDNSDVDKLFIQLVQTYNQLFEENPINASGVDAKAILSARLSKSRRLENLIAQLPGEKKNG
LFGNLIALSLGLTPNFKSNFDLAEDAKLQLSKDTYDDDLDNLLAQIGDQYADLFLAAKNLSD
AILLSDILRVNTEITKAPLSASMIKRYDEHHQDLTLLKALVRQQLPEKYKEIFFDQSKNGYA
GYIDGGASQEEFYKFIKPILEKMDGTEELLVKLNREDLLRKQRTFDNGSIPHQIHLGELHAI
LRRQEDFYPFLKDNREKIEKILTFRIPYYVGPLARGNSRFAWMTRKSEETITPWNFEEVVDK
GASAQSFIERMTNFDKNLPNEKVLPKHSLLYEYFTVYNELTKVKYVTEGMRKPAFLSGEQKK
AIVDLLFKTNRKVTVKQLKEDYFKKIECFDSVEISGVEDRFNASLGTYHDLLKIIKDKDFLD
NEENEDILEDIVLTLTLFEDREMIEERLKTYAHLFDDKVMKQLKRRRYTGWGRLSRKLINGI
RDKQSGKTILDFLKSDGFANRNFMQLIHDDSLTFKEDIQKAQVSGQGDSLHEHIANLAGSPA
IKKGILQTVKVVDELVKVMGRHKPENIVIEMARENQTTQKGQKNSRERMKRIEEGIKELGSQ
ILKEHPVENTQLQNEKLYLYYLQNGRDMYVDQELDINRLSDYDVDHIVPQSFLKDDSIDNKV
LTRSDKNRGKSDNVPSEEVVKKMKNYWRQLLNAKLITQRKFDNLTKAERGGLSELDKAGFIK
RQLVETRQITKHVAQILDSRMNTKYDENDKLIREVKVITLKSKLVSDFRKDFQFYKVREINN
YHHAHDAYLNAVVGTALIKKYPKLESEFVYGDYKVYDVRKMIAKSEQEIGKATAKYFFYSNI
MNFFKTEITLANGEIRKRPLIETNGETGEIVWDKGRDFATVRKVLSMPQVNIVKKTEVQTGG
FSKESILPKRNSDKLIARKKDWDPKKYGGFVSPTVAYSVLVVAKVEKGKSKKLKSVKELLGI
TIMERSSFEKNPIDFLEAKGYKEVKKDLIIKLPKYSLFELENGRKRMLASARELQKGNELAL
PSKYVNFLYLASHYEKLKGSPEDNEQKQLFVEQHKHYLDEIIEQISEFSKRVILADANLDKV
LSAYNKHRDKPIREQAENIIHLFTLTNLGAPAAFKYFDTTIDRKQYRSTKEVLDATLIHQSI
TGLYETRIDLSQLGGDEGADKRTADGSEFESPKKKRKV
03. monoABE8.1_bpNLS + Q154S
MSEVEFSHEYWMRHALTLAKRARDEREVPVGAVLVLNNRVIGEGWNRAIGLHDPTAHAEIMA
LRQGGLVMQNYRLIDATLYVTFEPCVMCAGAMIHSRIGRVVFGVRNAKTGAAGSLMDVLHYP
GMNHRVEITEGILADECAALLCYFFRMPRSVFNAQKKAQSSTDSGGSSGGSSGSETPGTSES
ATPESSGGSSGGSDKKYSIGLAIGTNSVGWAVITDEYKVPSKKFKVLGNTDRHSIKKNLIGA
LLFDSGETAEATRLKRTARRRYTRRKNRICYLQEIFSNEMAKVDDSFFHRLEESFLVEEDKK
HERHPIFGNIVDEVAYHEKYPTIYHLRKKLVDSTDKADLRLIYLALAHMIKFRGHFLIEGDL
NPDNSDVDKLFIQLVQTYNQLFEENPINASGVDAKAILSARLSKSRRLENLIAQLPGEKKNG
LFGNLIALSLGLTPNFKSNFDLAEDAKLQLSKDTYDDDLDNLLAQIGDQYADLFLAAKNLSD
AILLSDILRVNTEITKAPLSASMIKRYDEHHQDLTLLKALVRQQLPEKYKEIFFDQSKNGYA
GYIDGGASQEEFYKFIKPILEKMDGTEELLVKLNREDLLRKQRTFDNGSIPHQIHLGELHAI
LRRQEDFYPFLKDNREKIEKILTFRIPYYVGPLARGNSRFAWMTRKSEETITPWNFEEVVDK
GASAQSFIERMTNFDKNLPNEKVLPKHSLLYEYFTVYNELTKVKYVTEGMRKPAFLSGEQKK
AIVDLLFKTNRKVTVKQLKEDYFKKIECFDSVEISGVEDRFNASLGTYHDLLKIIKDKDFLD
NEENEDILEDIVLTLTLFEDREMIEERLKTYAHLFDDKVMKQLKRRRYTGWGRLSRKLINGI
RDKQSGKTILDFLKSDGFANRNFMQLIHDDSLTFKEDIQKAQVSGQGDSLHEHIANLAGSPA
IKKGILQTVKVVDELVKVMGRHKPENIVIEMARENQTTQKGQKNSRERMKRIEEGIKELGSQ
ILKEHPVENTQLQNEKLYLYYLQNGRDMYVDQELDINRLSDYDVDHIVPQSFLKDDSIDNKV
LTRSDKNRGKSDNVPSEEVVKKMKNYWRQLLNAKLITQRKFDNLTKAERGGLSELDKAGFIK
RQLVETRQITKHVAQILDSRMNTKYDENDKLIREVKVITLKSKLVSDFRKDFQFYKVREINN
YHHAHDAYLNAVVGTALIKKYPKLESEFVYGDYKVYDVRKMIAKSEQEIGKATAKYFFYSNI
MNFFKTEITLANGEIRKRPLIETNGETGEIVWDKGRDFATVRKVLSMPQVNIVKKTEVQTGG
FSKESILPKRNSDKLIARKKDWDPKKYGGFVSPTVAYSVLVVAKVEKGKSKKLKSVKELLGI
TIMERSSFEKNPIDFLEAKGYKEVKKDLIIKLPKYSLFELENGRKRMLASARELQKGNELAL
PSKYVNFLYLASHYEKLKGSPEDNEQKQLFVEQHKHYLDEIIEQISEFSKRVILADANLDKV
LSAYNKHRDKPIREQAENIIHLFTLTNLGAPAAFKYFDTTIDRKQYRSTKEVLDATLIHQSI
TGLYETRIDLSQLGGDEGADKRTADGSEFESPKKKRKV
04. monoABE8.1_bpNLS + Y123H
MSEVEFSHEYWMRHALTLAKRARDEREVPVGAVLVLNNRVIGEGWNRAIGLHDPTAHAEIMA
LRQGGLVMQNYRLIDATLYVTFEPCVMCAGAMIHSRIGRVVFGVRNAKTGAAGSLMDVLHHP
GMNHRVEITEGILADECAALLCYFFRMPRQVFNAQKKAQSSTDSGGSSGGSSGSETPGTSES
ATPESSGGSSGGSDKKYSIGLAIGTNSVGWAVITDEYKVPSKKFKVLGNTDRHSIKKNLIGA
LLFDSGETAEATRLKRTARRRYTRRKNRICYLQEIFSNEMAKVDDSFFHRLEESFLVEEDKK
HERHPIFGNIVDEVAYHEKYPTIYHLRKKLVDSTDKADLRLIYLALAHMIKFRGHFLIEGDL
NPDNSDVDKLFIQLVQTYNQLFEENPINASGVDAKAILSARLSKSRRLENLIAQLPGEKKNG
LFGNLIALSLGLTPNFKSNFDLAEDAKLQLSKDTYDDDLDNLLAQIGDQYADLFLAAKNLSD
AILLSDILRVNTEITKAPLSASMIKRYDEHHQDLTLLKALVRQQLPEKYKEIFFDQSKNGYA
GYIDGGASQEEFYKFIKPILEKMDGTEELLVKLNREDLLRKQRTFDNGSIPHQIHLGELHAI
LRRQEDFYPFLKDNREKIEKILTFRIPYYVGPLARGNSRFAWMTRKSEETITPWNFEEVVDK
GASAQSFIERMTNFDKNLPNEKVLPKHSLLYEYFTVYNELTKVKYVTEGMRKPAFLSGEQKK
AIVDLLFKTNRKVTVKQLKEDYFKKIECFDSVEISGVEDRFNASLGTYHDLLKIIKDKDFLD
NEENEDILEDIVLTLTLFEDREMIEERLKTYAHLFDDKVMKQLKRRRYTGWGRLSRKLINGI
RDKQSGKTILDFLKSDGFANRNFMQLIHDDSLTFKEDIQKAQVSGQGDSLHEHIANLAGSPA
IKKGILQTVKVVDELVKVMGRHKPENIVIEMARENQTTQKGQKNSRERMKRIEEGIKELGSQ
ILKEHPVENTQLQNEKLYLYYLQNGRDMYVDQELDINRLSDYDVDHIVPQSFLKDDSIDNKV
LTRSDKNRGKSDNVPSEEVVKKMKNYWRQLLNAKLITQRKFDNLTKAERGGLSELDKAGFIK
RQLVETRQITKHVAQILDSRMNTKYDENDKLIREVKVITLKSKLVSDFRKDFQFYKVREINN
YHHAHDAYLNAVVGTALIKKYPKLESEFVYGDYKVYDVRKMIAKSEQEIGKATAKYFFYSNI
MNFFKTEITLANGEIRKRPLIETNGETGEIVWDKGRDFATVRKVLSMPQVNIVKKTEVQTGG
FSKESILPKRNSDKLIARKKDWDPKKYGGFVSPTVAYSVLVVAKVEKGKSKKLKSVKELLGI
TIMERSSFEKNPIDFLEAKGYKEVKKDLIIKLPKYSLFELENGRKRMLASARELQKGNELAL
PSKYVNFLYLASHYEKLKGSPEDNEQKQLFVEQHKHYLDEIIEQISEFSKRVILADANLDKV
LSAYNKHRDKPIREQAENIIHLFTLTNLGAPAAFKYFDTTIDRKQYRSTKEVLDATLIHQSI
TGLYETRIDLSQLGGDEGADKRTADGSEFESPKKKRKV
05. monoABE8.1_bpNLS + V82S
MSEVEFSHEYWMRHALTLAKRARDEREVPVGAVLVLNNRVIGEGWNRAIGLHDPTAHAEIMA
LRQGGLVMQNYRLIDATLYSTFEPCVMCAGAMIHSRIGRVVFGVRNAKTGAAGSLMDVLHYP
GMNHRVEITEGILADECAALLCYFFRMPRQVFNAQKKAQSSTDSGGSSGGSSGSETPGTSES
ATPESSGGSSGGSDKKYSIGLAIGTNSVGWAVITDEYKVPSKKFKVLGNTDRHSIKKNLIGA
LLFDSGETAEATRLKRTARRRYTRRKNRICYLQEIFSNEMAKVDDSFFHRLEESFLVEEDKK
HERHPIFGNIVDEVAYHEKYPTIYHLRKKLVDSTDKADLRLIYLALAHMIKFRGHFLIEGDL
NPDNSDVDKLFIQLVQTYNQLFEENPINASGVDAKAILSARLSKSRRLENLIAQLPGEKKNG
LFGNLIALSLGLTPNFKSNFDLAEDAKLQLSKDTYDDDLDNLLAQIGDQYADLFLAAKNLSD
AILLSDILRVNTEITKAPLSASMIKRYDEHHQDLTLLKALVRQQLPEKYKEIFFDQSKNGYA
GYIDGGASQEEFYKFIKPILEKMDGTEELLVKLNREDLLRKQRTFDNGSIPHQIHLGELHAI
LRRQEDFYPFLKDNREKIEKILTFRIPYYVGPLARGNSRFAWMTRKSEETITPWNFEEVVDK
GASAQSFIERMTNFDKNLPNEKVLPKHSLLYEYFTVYNELTKVKYVTEGMRKPAFLSGEQKK
AIVDLLFKTNRKVTVKQLKEDYFKKIECFDSVEISGVEDRFNASLGTYHDLLKIIKDKDFLD
NEENEDILEDIVLTLTLFEDREMIEERLKTYAHLFDDKVMKQLKRRRYTGWGRLSRKLINGI
RDKQSGKTILDFLKSDGFANRNFMQLIHDDSLTFKEDIQKAQVSGQGDSLHEHIANLAGSPA
IKKGILQTVKVVDELVKVMGRHKPENIVIEMARENQTTQKGQKNSRERMKRIEEGIKELGSQ
ILKEHPVENTQLQNEKLYLYYLQNGRDMYVDQELDINRLSDYDVDHIVPQSFLKDDSIDNKV
LTRSDKNRGKSDNVPSEEVVKKMKNYWRQLLNAKLITQRKFDNLTKAERGGLSELDKAGFIK
RQLVETRQITKHVAQILDSRMNTKYDENDKLIREVKVITLKSKLVSDFRKDFQFYKVREINN
YHHAHDAYLNAVVGTALIKKYPKLESEFVYGDYKVYDVRKMIAKSEQEIGKATAKYFFYSNI
MNFFKTEITLANGEIRKRPLIETNGETGEIVWDKGRDFATVRKVLSMPQVNIVKKTEVQTGG
FSKESILPKRNSDKLIARKKDWDPKKYGGFVSPTVAYSVLVVAKVEKGKSKKLKSVKELLGI
TIMERSSFEKNPIDFLEAKGYKEVKKDLIIKLPKYSLFELENGRKRMLASARELQKGNELAL
PSKYVNFLYLASHYEKLKGSPEDNEQKQLFVEQHKHYLDEIIEQISEFSKRVILADANLDKV
LSAYNKHRDKPIREQAENIIHLFTLTNLGAPAAFKYFDTTIDRKQYRSTKEVLDATLIHQSI
TGLYETRIDLSQLGGDEGADKRTADGSEFESPKKKRKV
06. monoABE8.1_bpNLS + T166R
MSEVEFSHEYWMRHALTLAKRARDEREVPVGAVLVLNNRVIGEGWNRAIGLHDPTAHAEIMA
LRQGGLVMQNYRLIDATLYVTFEPCVMCAGAMIHSRIGRVVFGVRNAKTGAAGSLMDVLHYP
GMNHRVEITEGILADECAALLCYFFRMPRQVFNAQKKAQSSRDSGGSSGGSSGSETPGTSES
ATPESSGGSSGGSDKKYSIGLAIGTNSVGWAVITDEYKVPSKKFKVLGNTDRHSIKKNLIGA
LLFDSGETAEATRLKRTARRRYTRRKNRICYLQEIFSNEMAKVDDSFFHRLEESFLVEEDKK
HERHPIFGNIVDEVAYHEKYPTIYHLRKKLVDSTDKADLRLIYLALAHMIKFRGHFLIEGDL
NPDNSDVDKLFIQLVQTYNQLFEENPINASGVDAKAILSARLSKSRRLENLIAQLPGEKKNG
LFGNLIALSLGLTPNFKSNFDLAEDAKLQLSKDTYDDDLDNLLAQIGDQYADLFLAAKNLSD
AILLSDILRVNTEITKAPLSASMIKRYDEHHQDLTLLKALVRQQLPEKYKEIFFDQSKNGYA
GYIDGGASQEEFYKFIKPILEKMDGTEELLVKLNREDLLRKQRTFDNGSIPHQIHLGELHAI
LRRQEDFYPFLKDNREKIEKILTFRIPYYVGPLARGNSRFAWMTRKSEETITPWNFEEVVDK
GASAQSFIERMTNFDKNLPNEKVLPKHSLLYEYFTVYNELTKVKYVTEGMRKPAFLSGEQKK
AIVDLLFKTNRKVTVKQLKEDYFKKIECFDSVEISGVEDRFNASLGTYHDLLKIIKDKDFLD
NEENEDILEDIVLTLTLFEDREMIEERLKTYAHLFDDKVMKQLKRRRYTGWGRLSRKLINGI
RDKQSGKTILDFLKSDGFANRNFMQLIHDDSLTFKEDIQKAQVSGQGDSLHEHIANLAGSPA
IKKGILQTVKVVDELVKVMGRHKPENIVIEMARENQTTQKGQKNSRERMKRIEEGIKELGSQ
ILKEHPVENTQLQNEKLYLYYLQNGRDMYVDQELDINRLSDYDVDHIVPQSFLKDDSIDNKV
LTRSDKNRGKSDNVPSEEVVKKMKNYWRQLLNAKLITQRKFDNLTKAERGGLSELDKAGFIK
RQLVETRQITKHVAQILDSRMNTKYDENDKLIREVKVITLKSKLVSDFRKDFQFYKVREINN
YHHAHDAYLNAVVGTALIKKYPKLESEFVYGDYKVYDVRKMIAKSEQEIGKATAKYFFYSNI
MNFFKTEITLANGEIRKRPLIETNGETGEIVWDKGRDFATVRKVLSMPQVNIVKKTEVQTGG
FSKESILPKRNSDKLIARKKDWDPKKYGGFVSPTVAYSVLVVAKVEKGKSKKLKSVKELLGI
TIMERSSFEKNPIDFLEAKGYKEVKKDLIIKLPKYSLFELENGRKRMLASARELQKGNELAL
PSKYVNFLYLASHYEKLKGSPEDNEQKQLFVEQHKHYLDEIIEQISEFSKRVILADANLDKV
LSAYNKHRDKPIREQAENIIHLFTLTNLGAPAAFKYFDTTIDRKQYRSTKEVLDATLIHQSI
TGLYETRIDLSQLGGDEGADKRTADGSEFESPKKKRKV
07. monoABE8.1_bpNLS + Q154R
MSEVEFSHEYWMRHALTLAKRARDEREVPVGAVLVLNNRVIGEGWNRAIGLHDPTAHAEIMA
LRQGGLVMQNYRLIDATLYVTFEPCVMCAGAMIHSRIGRVVFGVRNAKTGAAGSLMDVLHYP
GMNHRVEITEGILADECAALLCYFFRMPRRVFNAQKKAQSSTDSGGSSGGSSGSETPGTSES
ATPESSGGSSGGSDKKYSIGLAIGTNSVGWAVITDEYKVPSKKFKVLGNTDRHSIKKNLIGA
LLFDSGETAEATRLKRTARRRYTRRKNRICYLQEIFSNEMAKVDDSFFHRLEESFLVEEDKK
HERHPIFGNIVDEVAYHEKYPTIYHLRKKLVDSTDKADLRLIYLALAHMIKFRGHFLIEGDL
NPDNSDVDKLFIQLVQTYNQLFEENPINASGVDAKAILSARLSKSRRLENLIAQLPGEKKNG
LFGNLIALSLGLTPNFKSNFDLAEDAKLQLSKDTYDDDLDNLLAQIGDQYADLFLAAKNLSD
AILLSDILRVNTEITKAPLSASMIKRYDEHHQDLTLLKALVRQQLPEKYKEIFFDQSKNGYA
GYIDGGASQEEFYKFIKPILEKMDGTEELLVKLNREDLLRKQRTFDNGSIPHQIHLGELHAI
LRRQEDFYPFLKDNREKIEKILTFRIPYYVGPLARGNSRFAWMTRKSEETITPWNFEEVVDK
GASAQSFIERMTNFDKNLPNEKVLPKHSLLYEYFTVYNELTKVKYVTEGMRKPAFLSGEQKK
AIVDLLFKTNRKVTVKQLKEDYFKKIECFDSVEISGVEDRFNASLGTYHDLLKIIKDKDFLD
NEENEDILEDIVLTLTLFEDREMIEERLKTYAHLFDDKVMKQLKRRRYTGWGRLSRKLINGI
RDKQSGKTILDFLKSDGFANRNFMQLIHDDSLTFKEDIQKAQVSGQGDSLHEHIANLAGSPA
IKKGILQTVKVVDELVKVMGRHKPENIVIEMARENQTTQKGQKNSRERMKRIEEGIKELGSQ
ILKEHPVENTQLQNEKLYLYYLQNGRDMYVDQELDINRLSDYDVDHIVPQSFLKDDSIDNKV
LTRSDKNRGKSDNVPSEEVVKKMKNYWRQLLNAKLITQRKFDNLTKAERGGLSELDKAGFIK
RQLVETRQITKHVAQILDSRMNTKYDENDKLIREVKVITLKSKLVSDFRKDFQFYKVREINN
YHHAHDAYLNAVVGTALIKKYPKLESEFVYGDYKVYDVRKMIAKSEQEIGKATAKYFFYSNI
MNFFKTEITLANGEIRKRPLIETNGETGEIVWDKGRDFATVRKVLSMPQVNIVKKTEVQTGG
FSKESILPKRNSDKLIARKKDWDPKKYGGFVSPTVAYSVLVVAKVEKGKSKKLKSVKELLGI
TIMERSSFEKNPIDFLEAKGYKEVKKDLIIKLPKYSLFELENGRKRMLASARELQKGNELAL
PSKYVNFLYLASHYEKLKGSPEDNEQKQLFVEQHKHYLDEIIEQISEFSKRVILADANLDKV
LSAYNKHRDKPIREQAENIIHLFTLTNLGAPAAFKYFDTTIDRKQYRSTKEVLDATLIHQSI
TGLYETRIDLSQLGGDEGADKRTADGSEFESPKKKRKV
08. monoABE8.1_bpNLS + Y147R_Q154R_Y123H
MSEVEFSHEYWMRHALTLAKRARDEREVPVGAVLVLNNRVIGEGWNRAIGLHDPTAHAEIMA
LRQGGLVMQNYRLIDATLYVTFEPCVMCAGAMIHSRIGRVVFGVRNAKTGAAGSLMDVLHHP
GMNHRVEITEGILADECAALLCRFFRMPRRVFNAQKKAQSSTDSGGSSGGSSGSETPGTSES
ATPESSGGSSGGSDKKYSIGLAIGTNSVGWAVITDEYKVPSKKFKVLGNTDRHSIKKNLIGA
LLFDSGETAEATRLKRTARRRYTRRKNRICYLQEIFSNEMAKVDDSFFHRLEESFLVEEDKK
HERHPIFGNIVDEVAYHEKYPTIYHLRKKLVDSTDKADLRLIYLALAHMIKFRGHFLIEGDL
NPDNSDVDKLFIQLVQTYNQLFEENPINASGVDAKAILSARLSKSRRLENLIAQLPGEKKNG
LFGNLIALSLGLTPNFKSNFDLAEDAKLQLSKDTYDDDLDNLLAQIGDQYADLFLAAKNLSD
AILLSDILRVNTEITKAPLSASMIKRYDEHHQDLTLLKALVRQQLPEKYKEIFFDQSKNGYA
GYIDGGASQEEFYKFIKPILEKMDGTEELLVKLNREDLLRKQRTFDNGSIPHQIHLGELHAI
LRRQEDFYPFLKDNREKIEKILTFRIPYYVGPLARGNSRFAWMTRKSEETITPWNFEEVVDK
GASAQSFIERMTNFDKNLPNEKVLPKHSLLYEYFTVYNELTKVKYVTEGMRKPAFLSGEQKK
AIVDLLFKTNRKVTVKQLKEDYFKKIECFDSVEISGVEDRFNASLGTYHDLLKIIKDKDFLD
NEENEDILEDIVLTLTLFEDREMIEERLKTYAHLFDDKVMKQLKRRRYTGWGRLSRKLINGI
RDKQSGKTILDFLKSDGFANRNFMQLIHDDSLTFKEDIQKAQVSGQGDSLHEHIANLAGSPA
IKKGILQTVKVVDELVKVMGRHKPENIVIEMARENQTTQKGQKNSRERMKRIEEGIKELGSQ
ILKEHPVENTQLQNEKLYLYYLQNGRDMYVDQELDINRLSDYDVDHIVPQSFLKDDSIDNKV
LTRSDKNRGKSDNVPSEEVVKKMKNYWRQLLNAKLITQRKFDNLTKAERGGLSELDKAGFIK
RQLVETRQITKHVAQILDSRMNTKYDENDKLIREVKVITLKSKLVSDFRKDFQFYKVREINN
YHHAHDAYLNAVVGTALIKKYPKLESEFVYGDYKVYDVRKMIAKSEQEIGKATAKYFFYSNI
MNFFKTEITLANGEIRKRPLIETNGETGEIVWDKGRDFATVRKVLSMPQVNIVKKTEVQTGG
FSKESILPKRNSDKLIARKKDWDPKKYGGFVSPTVAYSVLVVAKVEKGKSKKLKSVKELLGI
TIMERSSFEKNPIDFLEAKGYKEVKKDLIIKLPKYSLFELENGRKRMLASARELQKGNELAL
PSKYVNFLYLASHYEKLKGSPEDNEQKQLFVEQHKHYLDEIIEQISEFSKRVILADANLDKV
LSAYNKHRDKPIREQAENIIHLFTLTNLGAPAAFKYFDTTIDRKQYRSTKEVLDATLIHQSI
TGLYETRIDLSQLGGDEGADKRTADGSEFESPKKKRKV
09. monoABE8.1_bpNLS + Y147R_Q154R_I76Y
MSEVEFSHEYWMRHALTLAKRARDEREVPVGAVLVLNNRVIGEGWNRAIGLHDPTAHAEIMA
LRQGGLVMQNYRLYDATLYVTFEPCVMCAGAMIHSRIGRVVFGVRNAKTGAAGSLMDVLHYP
GMNHRVEITEGILADECAALLCRFFRMPRRVFNAQKKAQSSTDSGGSSGGSSGSETPGTSES
ATPESSGGSSGGSDKKYSIGLAIGTNSVGWAVITDEYKVPSKKFKVLGNTDRHSIKKNLIGA
LLFDSGETAEATRLKRTARRRYTRRKNRICYLQEIFSNEMAKVDDSFFHRLEESFLVEEDKK
HERHPIFGNIVDEVAYHEKYPTIYHLRKKLVDSTDKADLRLIYLALAHMIKFRGHFLIEGDL
NPDNSDVDKLFIQLVQTYNQLFEENPINASGVDAKAILSARLSKSRRLENLIAQLPGEKKNG
LFGNLIALSLGLTPNFKSNFDLAEDAKLQLSKDTYDDDLDNLLAQIGDQYADLFLAAKNLSD
AILLSDILRVNTEITKAPLSASMIKRYDEHHQDLTLLKALVRQQLPEKYKEIFFDQSKNGYA
GYIDGGASQEEFYKFIKPILEKMDGTEELLVKLNREDLLRKQRTFDNGSIPHQIHLGELHAI
LRRQEDFYPFLKDNREKIEKILTFRIPYYVGPLARGNSRFAWMTRKSEETITPWNFEEVVDK
GASAQSFIERMTNFDKNLPNEKVLPKHSLLYEYFTVYNELTKVKYVTEGMRKPAFLSGEQKK
AIVDLLFKTNRKVTVKQLKEDYFKKIECFDSVEISGVEDRFNASLGTYHDLLKIIKDKDFLD
NEENEDILEDIVLTLTLFEDREMIEERLKTYAHLFDDKVMKQLKRRRYTGWGRLSRKLINGI
RDKQSGKTILDFLKSDGFANRNFMQLIHDDSLTFKEDIQKAQVSGQGDSLHEHIANLAGSPA
IKKGILQTVKVVDELVKVMGRHKPENIVIEMARENQTTQKGQKNSRERMKRIEEGIKELGSQ
ILKEHPVENTQLQNEKLYLYYLQNGRDMYVDQELDINRLSDYDVDHIVPQSFLKDDSIDNKV
LTRSDKNRGKSDNVPSEEVVKKMKNYWRQLLNAKLITQRKFDNLTKAERGGLSELDKAGFIK
RQLVETRQITKHVAQILDSRMNTKYDENDKLIREVKVITLKSKLVSDFRKDFQFYKVREINN
YHHAHDAYLNAVVGTALIKKYPKLESEFVYGDYKVYDVRKMIAKSEQEIGKATAKYFFYSNI
MNFFKTEITLANGEIRKRPLIETNGETGEIVWDKGRDFATVRKVLSMPQVNIVKKTEVQTGG
FSKESILPKRNSDKLIARKKDWDPKKYGGFVSPTVAYSVLVVAKVEKGKSKKLKSVKELLGI
TIMERSSFEKNPIDFLEAKGYKEVKKDLIIKLPKYSLFELENGRKRMLASARELQKGNELAL
PSKYVNFLYLASHYEKLKGSPEDNEQKQLFVEQHKHYLDEIIEQISEFSKRVILADANLDKV
LSAYNKHRDKPIREQAENIIHLFTLTNLGAPAAFKYFDTTIDRKQYRSTKEVLDATLIHQSI
TGLYETRIDLSQLGGDEGADKRTADGSEFESPKKKRKV
10. monoABE8.1_bpNLS + Y147R_Q154R_T166R
MSEVEFSHEYWMRHALTLAKRARDEREVPVGAVLVLNNRVIGEGWNRAIGLHDPTAHAEIMA
LRQGGLVMQNYRLIDATLYVTFEPCVMCAGAMIHSRIGRVVFGVRNAKTGAAGSLMDVLHYP
GMNHRVEITEGILADECAALLCRFFRMPRRVFNAQKKAQSSRDSGGSSGGSSGSETPGTSES
ATPESSGGSSGGSDKKYSIGLAIGTNSVGWAVITDEYKVPSKKFKVLGNTDRHSIKKNLIGA
LLFDSGETAEATRLKRTARRRYTRRKNRICYLQEIFSNEMAKVDDSFFHRLEESFLVEEDKK
HERHPIFGNIVDEVAYHEKYPTIYHLRKKLVDSTDKADLRLIYLALAHMIKFRGHFLIEGDL
NPDNSDVDKLFIQLVQTYNQLFEENPINASGVDAKAILSARLSKSRRLENLIAQLPGEKKNG
LFGNLIALSLGLTPNFKSNFDLAEDAKLQLSKDTYDDDLDNLLAQIGDQYADLFLAAKNLSD
AILLSDILRVNTEITKAPLSASMIKRYDEHHQDLTLLKALVRQQLPEKYKEIFFDQSKNGYA
GYIDGGASQEEFYKFIKPILEKMDGTEELLVKLNREDLLRKQRTFDNGSIPHQIHLGELHAI
LRRQEDFYPFLKDNREKIEKILTFRIPYYVGPLARGNSRFAWMTRKSEETITPWNFEEVVDK
GASAQSFIERMTNFDKNLPNEKVLPKHSLLYEYFTVYNELTKVKYVTEGMRKPAFLSGEQKK
AIVDLLFKTNRKVTVKQLKEDYFKKIECFDSVEISGVEDRFNASLGTYHDLLKIIKDKDFLD
NEENEDILEDIVLTLTLFEDREMIEERLKTYAHLFDDKVMKQLKRRRYTGWGRLSRKLINGI
RDKQSGKTILDFLKSDGFANRNFMQLIHDDSLTFKEDIQKAQVSGQGDSLHEHIANLAGSPA
IKKGILQTVKVVDELVKVMGRHKPENIVIEMARENQTTQKGQKNSRERMKRIEEGIKELGSQ
ILKEHPVENTQLQNEKLYLYYLQNGRDMYVDQELDINRLSDYDVDHIVPQSFLKDDSIDNKV
LTRSDKNRGKSDNVPSEEVVKKMKNYWRQLLNAKLITQRKFDNLTKAERGGLSELDKAGFIK
RQLVETRQITKHVAQILDSRMNTKYDENDKLIREVKVITLKSKLVSDFRKDFQFYKVREINN
YHHAHDAYLNAVVGTALIKKYPKLESEFVYGDYKVYDVRKMIAKSEQEIGKATAKYFFYSNI
MNFFKTEITLANGEIRKRPLIETNGETGEIVWDKGRDFATVRKVLSMPQVNIVKKTEVQTGG
FSKESILPKRNSDKLIARKKDWDPKKYGGFVSPTVAYSVLVVAKVEKGKSKKLKSVKELLGI
TIMERSSFEKNPIDFLEAKGYKEVKKDLIIKLPKYSLFELENGRKRMLASARELQKGNELAL
PSKYVNFLYLASHYEKLKGSPEDNEQKQLFVEQHKHYLDEIIEQISEFSKRVILADANLDKV
LSAYNKHRDKPIREQAENIIHLFTLTNLGAPAAFKYFDTTIDRKQYRSTKEVLDATLIHQSI
TGLYETRIDLSQLGGDEGADKRTADGSEFESPKKKRKV
11. monoABE8.1_bpNLS + Y147T_Q154R
MSEVEFSHEYWMRHALTLAKRARDEREVPVGAVLVLNNRVIGEGWNRAIGLHDPTAHAEIMA
LRQGGLVMQNYRLIDATLYVTFEPCVMCAGAMIHSRIGRVVFGVRNAKTGAAGSLMDVLHYP
GMNHRVEITEGILADECAALLCTFFRMPRRVFNAQKKAQSSTDSGGSSGGSSGSETPGTSES
ATPESSGGSSGGSDKKYSIGLAIGTNSVGWAVITDEYKVPSKKFKVLGNTDRHSIKKNLIGA
LLFDSGETAEATRLKRTARRRYTRRKNRICYLQEIFSNEMAKVDDSFFHRLEESFLVEEDKK
HERHPIFGNIVDEVAYHEKYPTIYHLRKKLVDSTDKADLRLIYLALAHMIKFRGHFLIEGDL
NPDNSDVDKLFIQLVQTYNQLFEENPINASGVDAKAILSARLSKSRRLENLIAQLPGEKKNG
LFGNLIALSLGLTPNFKSNFDLAEDAKLQLSKDTYDDDLDNLLAQIGDQYADLFLAAKNLSD
AILLSDILRVNTEITKAPLSASMIKRYDEHHQDLTLLKALVRQQLPEKYKEIFFDQSKNGYA
GYIDGGASQEEFYKFIKPILEKMDGTEELLVKLNREDLLRKQRTFDNGSIPHQIHLGELHAI
LRRQEDFYPFLKDNREKIEKILTFRIPYYVGPLARGNSRFAWMTRKSEETITPWNFEEVVDK
GASAQSFIERMTNFDKNLPNEKVLPKHSLLYEYFTVYNELTKVKYVTEGMRKPAFLSGEQKK
AIVDLLFKTNRKVTVKQLKEDYFKKIECFDSVEISGVEDRFNASLGTYHDLLKIIKDKDFLD
NEENEDILEDIVLTLTLFEDREMIEERLKTYAHLFDDKVMKQLKRRRYTGWGRLSRKLINGI
RDKQSGKTILDFLKSDGFANRNFMQLIHDDSLTFKEDIQKAQVSGQGDSLHEHIANLAGSPA
IKKGILQTVKVVDELVKVMGRHKPENIVIEMARENQTTQKGQKNSRERMKRIEEGIKELGSQ
ILKEHPVENTQLQNEKLYLYYLQNGRDMYVDQELDINRLSDYDVDHIVPQSFLKDDSIDNKV
LTRSDKNRGKSDNVPSEEVVKKMKNYWRQLLNAKLITQRKFDNLTKAERGGLSELDKAGFIK
RQLVETRQITKHVAQILDSRMNTKYDENDKLIREVKVITLKSKLVSDFRKDFQFYKVREINN
YHHAHDAYLNAVVGTALIKKYPKLESEFVYGDYKVYDVRKMIAKSEQEIGKATAKYFFYSNI
MNFFKTEITLANGEIRKRPLIETNGETGEIVWDKGRDFATVRKVLSMPQVNIVKKTEVQTGG
FSKESILPKRNSDKLIARKKDWDPKKYGGFVSPTVAYSVLVVAKVEKGKSKKLKSVKELLGI
TIMERSSFEKNPIDFLEAKGYKEVKKDLIIKLPKYSLFELENGRKRMLASARELQKGNELAL
PSKYVNFLYLASHYEKLKGSPEDNEQKQLFVEQHKHYLDEIIEQISEFSKRVILADANLDKV
LSAYNKHRDKPIREQAENIIHLFTLTNLGAPAAFKYFDTTIDRKQYRSTKEVLDATLIHQSI
TGLYETRIDLSQLGGDEGADKRTADGSEFESPKKKRKV
12. monoABE8.1_bpNLS + Y147T_Q154S
MSEVEFSHEYWMRHALTLAKRARDEREVPVGAVLVLNNRVIGEGWNRAIGLHDPTAHAEIMA
LRQGGLVMQNYRLIDATLYVTFEPCVMCAGAMIHSRIGRVVFGVRNAKTGAAGSLMDVLHYP
GMNHRVEITEGILADECAALLCTFFRMPRSVFNAQKKAQSSTDSGGSSGGSSGSETPGTSES
ATPESSGGSSGGSDKKYSIGLAIGTNSVGWAVITDEYKVPSKKFKVLGNTDRHSIKKNLIGA
LLFDSGETAEATRLKRTARRRYTRRKNRICYLQEIFSNEMAKVDDSFFHRLEESFLVEEDKK
HERHPIFGNIVDEVAYHEKYPTIYHLRKKLVDSTDKADLRLIYLALAHMIKFRGHFLIEGDL
NPDNSDVDKLFIQLVQTYNQLFEENPINASGVDAKAILSARLSKSRRLENLIAQLPGEKKNG
LFGNLIALSLGLTPNFKSNFDLAEDAKLQLSKDTYDDDLDNLLAQIGDQYADLFLAAKNLSD
AILLSDILRVNTEITKAPLSASMIKRYDEHHQDLTLLKALVRQQLPEKYKEIFFDQSKNGYA
GYIDGGASQEEFYKFIKPILEKMDGTEELLVKLNREDLLRKQRTFDNGSIPHQIHLGELHAI
LRRQEDFYPFLKDNREKIEKILTFRIPYYVGPLARGNSRFAWMTRKSEETITPWNFEEVVDK
GASAQSFIERMTNFDKNLPNEKVLPKHSLLYEYFTVYNELTKVKYVTEGMRKPAFLSGEQKK
AIVDLLFKTNRKVTVKQLKEDYFKKIECFDSVEISGVEDRFNASLGTYHDLLKIIKDKDFLD
NEENEDILEDIVLTLTLFEDREMIEERLKTYAHLFDDKVMKQLKRRRYTGWGRLSRKLINGI
RDKQSGKTILDFLKSDGFANRNFMQLIHDDSLTFKEDIQKAQVSGQGDSLHEHIANLAGSPA
IKKGILQTVKVVDELVKVMGRHKPENIVIEMARENQTTQKGQKNSRERMKRIEEGIKELGSQ
ILKEHPVENTQLQNEKLYLYYLQNGRDMYVDQELDINRLSDYDVDHIVPQSFLKDDSIDNKV
LTRSDKNRGKSDNVPSEEVVKKMKNYWRQLLNAKLITQRKFDNLTKAERGGLSELDKAGFIK
RQLVETRQITKHVAQILDSRMNTKYDENDKLIREVKVITLKSKLVSDFRKDFQFYKVREINN
YHHAHDAYLNAVVGTALIKKYPKLESEFVYGDYKVYDVRKMIAKSEQEIGKATAKYFFYSNI
MNFFKTEITLANGEIRKRPLIETNGETGEIVWDKGRDFATVRKVLSMPQVNIVKKTEVQTGG
FSKESILPKRNSDKLIARKKDWDPKKYGGFVSPTVAYSVLVVAKVEKGKSKKLKSVKELLGI
TIMERSSFEKNPIDFLEAKGYKEVKKDLIIKLPKYSLFELENGRKRMLASARELQKGNELAL
PSKYVNFLYLASHYEKLKGSPEDNEQKQLFVEQHKHYLDEIIEQISEFSKRVILADANLDKV
LSAYNKHRDKPIREQAENIIHLFTLTNLGAPAAFKYFDTTIDRKQYRSTKEVLDATLIHQSI
TGLYETRIDLSQLGGDEGADKRTADGSEFESPKKKRKV
13. monoABE8.1_bpNLS + H123Y123H_Y147R_Q154R_I76Y
MSEVEFSHEYWMRHALTLAKRARDEREVPVGAVLVLNNRVIGEGWNRAIGLHDPTAHAEIMA
LRQGGLVMQNYRLYDATLYVTFEPCVMCAGAMIHSRIGRVVFGVRNAKTGAAGSLMDVLHHP
GMNHRVEITEGILADECAALLCRFFRMPRRVFNAQKKAQSSTDSGGSSGGSSGSETPGTSES
ATPESSGGSSGGSDKKYSIGLAIGTNSVGWAVITDEYKVPSKKFKVLGNTDRHSIKKNLIGA
LLFDSGETAEATRLKRTARRRYTRRKNRICYLQEIFSNEMAKVDDSFFHRLEESFLVEEDKK
HERHPIFGNIVDEVAYHEKYPTIYHLRKKLVDSTDKADLRLIYLALAHMIKFRGHFLIEGDL
NPDNSDVDKLFIQLVQTYNQLFEENPINASGVDAKAILSARLSKSRRLENLIAQLPGEKKNG
LFGNLIALSLGLTPNFKSNFDLAEDAKLQLSKDTYDDDLDNLLAQIGDQYADLFLAAKNLSD
AILLSDILRVNTEITKAPLSASMIKRYDEHHQDLTLLKALVRQQLPEKYKEIFFDQSKNGYA
GYIDGGASQEEFYKFIKPILEKMDGTEELLVKLNREDLLRKQRTFDNGSIPHQIHLGELHAI
LRRQEDFYPFLKDNREKIEKILTFRIPYYVGPLARGNSRFAWMTRKSEETITPWNFEEVVDK
GASAQSFIERMTNFDKNLPNEKVLPKHSLLYEYFTVYNELTKVKYVTEGMRKPAFLSGEQKK
AIVDLLFKTNRKVTVKQLKEDYFKKIECFDSVEISGVEDRFNASLGTYHDLLKIIKDKDFLD
NEENEDILEDIVLTLTLFEDREMIEERLKTYAHLFDDKVMKQLKRRRYTGWGRLSRKLINGI
RDKQSGKTILDFLKSDGFANRNFMQLIHDDSLTFKEDIQKAQVSGQGDSLHEHIANLAGSPA
IKKGILQTVKVVDELVKVMGRHKPENIVIEMARENQTTQKGQKNSRERMKRIEEGIKELGSQ
ILKEHPVENTQLQNEKLYLYYLQNGRDMYVDQELDINRLSDYDVDHIVPQSFLKDDSIDNKV
LTRSDKNRGKSDNVPSEEVVKKMKNYWRQLLNAKLITQRKFDNLTKAERGGLSELDKAGFIK
RQLVETRQITKHVAQILDSRMNTKYDENDKLIREVKVITLKSKLVSDFRKDFQFYKVREINN
YHHAHDAYLNAVVGTALIKKYPKLESEFVYGDYKVYDVRKMIAKSEQEIGKATAKYFFYSNI
MNFFKTEITLANGEIRKRPLIETNGETGEIVWDKGRDFATVRKVLSMPQVNIVKKTEVQTGG
FSKESILPKRNSDKLIARKKDWDPKKYGGFVSPTVAYSVLVVAKVEKGKSKKLKSVKELLGI
TIMERSSFEKNPIDFLEAKGYKEVKKDLIIKLPKYSLFELENGRKRMLASARELQKGNELAL
PSKYVNFLYLASHYEKLKGSPEDNEQKQLFVEQHKHYLDEIIEQISEFSKRVILADANLDKV
LSAYNKHRDKPIREQAENIIHLFTLTNLGAPAAFKYFDTTIDRKQYRSTKEVLDATLIHQSI
TGLYETRIDLSQLGGDEGADKRTADGSEFESPKKKRKV
14. monoABE8.1_bpNLS + V82S + Q154R
MSEVEFSHEYWMRHALTLAKRARDEREVPVGAVLVLNNRVIGEGWNRAIGLHDPTAHAEIMA
LRQGGLVMQNYRLIDATLYSTFEPCVMCAGAMIHSRIGRVVFGVRNAKTGAAGSLMDVLHYP
GMNHRVEITEGILADECAALLCYFFRMPRRVFNAQKKAQSSTDSGGSSGGSSGSETPGTSES
ATPESSGGSSGGSDKKYSIGLAIGTNSVGWAVITDEYKVPSKKFKVLGNTDRHSIKKNLIGA
LLFDSGETAEATRLKRTARRRYTRRKNRICYLQEIFSNEMAKVDDSFFHRLEESFLVEEDKK
HERHPIFGNIVDEVAYHEKYPTIYHLRKKLVDSTDKADLRLIYLALAHMIKFRGHFLIEGDL
NPDNSDVDKLFIQLVQTYNQLFEENPINASGVDAKAILSARLSKSRRLENLIAQLPGEKKNG
LFGNLIALSLGLTPNFKSNFDLAEDAKLQLSKDTYDDDLDNLLAQIGDQYADLFLAAKNLSD
AILLSDILRVNTEITKAPLSASMIKRYDEHHQDLTLLKALVRQQLPEKYKEIFFDQSKNGYA
GYIDGGASQEEFYKFIKPILEKMDGTEELLVKLNREDLLRKQRTFDNGSIPHQIHLGELHAI
LRRQEDFYPFLKDNREKIEKILTFRIPYYVGPLARGNSRFAWMTRKSEETITPWNFEEVVDK
GASAQSFIERMTNFDKNLPNEKVLPKHSLLYEYFTVYNELTKVKYVTEGMRKPAFLSGEQKK
AIVDLLFKTNRKVTVKQLKEDYFKKIECFDSVEISGVEDRFNASLGTYHDLLKIIKDKDFLD
NEENEDILEDIVLTLTLFEDREMIEERLKTYAHLFDDKVMKQLKRRRYTGWGRLSRKLINGI
RDKQSGKTILDFLKSDGFANRNFMQLIHDDSLTFKEDIQKAQVSGQGDSLHEHIANLAGSPA
IKKGILQTVKVVDELVKVMGRHKPENIVIEMARENQTTQKGQKNSRERMKRIEEGIKELGSQ
ILKEHPVENTQLQNEKLYLYYLQNGRDMYVDQELDINRLSDYDVDHIVPQSFLKDDSIDNKV
LTRSDKNRGKSDNVPSEEVVKKMKNYWRQLLNAKLITQRKFDNLTKAERGGLSELDKAGFIK
RQLVETRQITKHVAQILDSRMNTKYDENDKLIREVKVITLKSKLVSDFRKDFQFYKVREINN
YHHAHDAYLNAVVGTALIKKYPKLESEFVYGDYKVYDVRKMIAKSEQEIGKATAKYFFYSNI
MNFFKTEITLANGEIRKRPLIETNGETGEIVWDKGRDFATVRKVLSMPQVNIVKKTEVQTGG
FSKESILPKRNSDKLIARKKDWDPKKYGGFVSPTVAYSVLVVAKVEKGKSKKLKSVKELLGI
TIMERSSFEKNPIDFLEAKGYKEVKKDLIIKLPKYSLFELENGRKRMLASARELQKGNELAL
PSKYVNFLYLASHYEKLKGSPEDNEQKQLFVEQHKHYLDEIIEQISEFSKRVILADANLDKV
LSAYNKHRDKPIREQAENIIHLFTLTNLGAPAAFKYFDTTIDRKQYRSTKEVLDATLIHQSI
TGLYETRIDLSQLGGDEGADKRTADGSEFESPKKKRKV

### OTHER EMBODIMENTS

[1160] From the foregoing description, it will be apparent that variations and modifications may be made to the invention described herein to adopt it to various usages and conditions. Such embodiments are also within the scope of the following claims.

[1161] The recitation of a listing of elements in any definition of a variable herein includes definitions of that variable as any single element or combination (or subcombination) of listed elements. The recitation of an embodiment herein includes that embodiment as any single embodiment or in combination with any other embodiments or portions thereof.

[1162] All publications, patents, and patent applications mentioned in this specification are herein incorporated by reference to the same extent as if each individual publication, patent, or patent application was specifically and individually indicated to be incorporated by reference. Absent any indication otherwise, publications, patents, and patent applications mentioned in this specification are incorporated herein by reference in their entireties.

The application's sequence listing, which the Patent Office published only in electronic form, follows.

SEQUENCE LISTING (497 sequences)

SEQ ID NO: 1 - protein, 1368 aa, Streptococcus pyogenes [sequence omitted]

SEQ ID NO: 2 - protein, 167 aa, Escherichia coli
MSEVEFSHEYWMRHALTLAKRAWDEREVPVGAVLVHNNRVIGEGWNRPIGRHDPTAHAEIMALRQGGLVMQNYRLIDATLYVTLEPCVMCAGAMIHSRIGRVVFGARDAKTGAAGSLMDVLHHPGMNHRVEITEGILADECAALLSDFFRMRRQEIKAQKKAQSSTD

SEQ ID NO: 3 - DNA, 9310 bp, Homo sapiens
gtttggggccagagtgggcgaggcgcggaggtctggcctataaagtagtcgcggagacggggtgctggtttgcgtcgtagtctcctgcagcgtctggggtttccgttgcagtcctcggaaccaggacctcggcgtggcctagcgagttatggcgacgaaggccgtgtgcgtgctgaagggcgacggcccagtgcagggcatcatcaatttcgagcagaaggcaagggctgggacggaggcttgtttgcgaggccgctcccacccgctcgtccccccgcgcacctttgctaggagcgggtcgcccgccaggcctcggggccgccctggtccagcgcccggtcccggcccgtgccgcccggtcggtgccttcgcccccagcggtgcggtgcccaagtgctgagtcaccgggcgggcccgggcgcggggcgtgggaccgaggccgccgcggggctgggcctgcgcgtggcgggagcgcggggagggattgccgcgggccggggaggggcgggggcgggcgtgctgccctctgtggtccttgggccgccgccgcgggtctgtcgtggtgcctggagcggctgtgctcgtcccttgcttggccgtgttctcgttcctgagggtcccgcggacaccgagtggcgcagtgccaggcccagcccggggatggcgactgcgcctgggcccgcctggtgtcttcgcatccctctccgctttccggcttcagcgctctaggtcagggagtcttcgcttttgtacagctctaaggctaggaatggtttttatatttttaaaaggctttggaaaacaaaaatacgcaacagagaccgtttgtgtgacactttgcagggaagtttgctggcctctgttctaggtcatgattgggctgcaagggcagagaaggtagccttgaacagaggtccttttcctcctcctaagctccgggagccagaggtttaactgacccttttggggatttttgagggcagtgatcttaactttgggtgcacagttagcttatttgaagatcttactaaaaatacaccagagcccaacctccgaccaattacatcaaaacctgtcctagtgcagggtgagtattgctgttttttgaaagtttccaaaagtgattttgatgtgcacctacgattgagaactgtcgtttgaggacagtgggtggagtttcgtatttggaaattagaagacctggagtttccattacaccgaattggcacttaataactgttgtcggagcatttcttaagccacattttcgtaaagtggctttaaaattgctctgccagtaggcaggttgctaagatggtcagagacaaacttctgaacgactcttgtaaaatatacagaaatattttcagaacttttatcagtaaaattacaaaacgtgttgcaaggaaggtgcttgtgataacactgtccccagaaccttagtgaagttaccaactggtggaaaattttctcttgcactcggcttaaaaatcatgagggaatatttactatacgaatgagattcagtctttaaaggggtttacagaaacgtgagaggacaggaacagttagtctgtgtaaatgtctgaaatatatgtgagggagataatgagtttagcctttttctttaataggtctccagattttctggaaaaggttctttggcatttgactccattttgctgtttcatttgtcagacttctttttgtccctctttacttctccccacataattcaccagtactagtgttttgtttttcagaccaagtctcgctctgtcgcccaggctggagtgcagtggcgcgatctcagctcactgcaacctccgcctcccaggttcaagcaattctcctgcctcagcctcccgggtagctgggactacaggcgcgcgccgccacgcctggctaattttttatattttagtagagacggcgtttcaccatgttggccaggatggtctcgatctgttgacgtcgtgatccacccgcctcggcctcccaaagtgctgggattacaggcgtgagccaccccgcccggccaccagtgctattcttaagacgcctctgaggaatcccttctccctggccattgagaatccatgcatgaacccaggttttccaccttccctgagcagcttgcatagttccttcttttaagcgcctgacttcgttttgtttggtgcccgttgtacctgagaatgagccttggatagtggagcattccagctttccagatatgcagagataatacattggctatcagctacttggcttggcctattccgtgtttaaaatcttggactctttgctagtttttacagatcagaatttttcacgtattaatccagttttcctagcttctcttgaagaatttttggagatctcttcatactgagccttcattagcccaggacagtactgctgtagcagttcatatattttttcgcttcccaggcctgtgttattcacttaagttcatagcctggtccctgcagggttgtacccgagcacagctacttagatgtcctgaatgtattaccggttaaatggaggtttcaaagaacctgctgtttttggccctgtgctcttgataacagagtgtttgagggacaactttcacatttgagtttttccaaaattaaaggttgtagaagagtcacagtatctattgtcaaaaagaaaagaatttaaaaaggcagcaattgccaggatacttcatttgagcaatgatattttccagtggaaagtcacatcttaagggttaatgccccttaactgttggccgtatttgaaaacaaaccaagctaaaaacaagagacactgacatgttgtatgacggtgtggtgtggatgttgtgtttattttagtcctgagatctagttgtaacttccttgatttctgtatgtagccacggagcaccattacctgtcaccattacctgaatggctatactgcttgctttcattttggtagagtggaaaggttacctaggtttcagtgcttgaaaagatttcagaaagcagtagtacgtctggttagactagaatcagtcctctcctgggggcagtggaatataatattttctgactgctaattaaaaatacctgtgatagccgggcgtggtggcttacgcctgtaatcccagcactttgggaggccgagacgggtggatcacgaggtcagcagatggagaccatcctggctaacacggtgaaaccccgtctctactaaaaatgcaaaaaaattagccgggtgtggtggtgggcgcctgtagtcccagctactcaggaggctgaggcaggagaatggcatgaacctgggaggcggagcttgcagtgagccgagatcatgtcactgcactccagcctgggcgacagagcgagactcgtctcaaaaaaaaaaagaaaaaaacttatgatggacacttaaaaacactcactgagtggggagtggagagcaggggtcccagggtagcctgttggacatttccagggcgactttttctttttttttttttaaagtcaagtgagtatgccatatggaaaagggtgtgcgtggagaaaaagcaaggggctccagagtgtaggatgagacatacaccttttgggttaaaaaggctgaggcaggagaatggcgtgaacccgggaggcggagcttgcagtgagctgagatcatgccactgcactccagcctgggcgacagagcgagactcttgtctcaaaataaaaaacgtttacatgtacatgtatattcaacatgtacaaatataacctattcaaaagtatttactacataaataggtacttacattacctatttactgtaatagtcaaagcctatgaagtatctaacactgatgtgtaggtactcactttgcttgccactctattaggtgctttttatgttatttaatcatgaagcctggccacagggtgcttgtgcattgagtgtgggaacaagattaccatctcccttttgaggacacaggcctagagcagttaagcagcttgctggaggttcactggctagaaagtggtcagcctgggatttggacacagatttttccactcccaagtctggctgctttttacttcactgtgaggggtaaaggtaaatcagctgttttctttgttcagaaactctctccaactttgcacttttcttaaaggaaagtaatggaccagtgaaggtgtggggaagcattaaaggactgactgaaggcctgcatggattccatgttcatgagtttggagataatacagcaggtgggtgttgtgctgtgctggtgacccatacttgttcaccctagttagataaacagtagagtagcccctaaacgttaaaacccctcaacttgtttttgtttttgagaaagggtcttgctctgtcgctcaggctggagtgcagtggcgctgtgcgatcatggctgaccttagccttgacctcccaggctccattgatcctcatgccttggcccgtagctgggactacaggtacacaccaccacgcctggctaatttttgtatttttttctagaggtggggtttcatcatgttgcccaggctggtcttgaactgctgggctcaagtggtctatcctcctcgacctcccaaagtgctgggattacatgtgtgagccactgtgcctgggaaaaccctcaacttttcttttaaaaaagaggtcaactttattgtatataagcactgtgctaaaattgcaggaactgggaccatatcctgatttttgtaataatgccagcagagtacacacaagaaaagtaactgcactagattgtgaagactggggtggacctgcttctgaaggtccagtgccctttgtcttaagatttggtgtagtgtgtctttagaaaccaaaaaaagagaagaagatcaaccttaagattagccacaaaactgggctttgatacctaggtgtggaaaagaaagggaaagagttgatgttttgtcttacagcatcattgtagaagagggtgtttttttgtttgtttgttttttgagacggagtcttactctgtggcccaggctggagtgcagtggcgcgatctcggctcactgcaagctccgcctcccgggttcatgccattctcctgcctcagccccctgagtagctgggactacaggtgcccgccaccccgcctggctaattttttgtatttttagtagagacggggtttcactgtgttagccaagatggtctctctcctgacctcgtgatccgcctgtctcagcctcccaaagtgctgggattacaggcatgagccaccgcacccagccagaagagggtgttttttaaagaaggcaaataggaaataaaaacttgggctcttaacttttgtaatgatcccaggtgtttgagctgggggttgagggtgggtgcctcgagcaaaggggctgcatttatttgcataatgccatgtaagagtagctctacaccccaaacacaggcttcttagtgggaccaaagtatgatacaaactgaagatggaatgcagaggattattggtactttggaatatgcttaaaaaaaatttttttaaagtatttttaaaaaatcaggcaacccctgaaccagagtaggttcagagaaactgccaaattttattttcttaatttgggattggaagcaagttaacagaagtttatgagttaagttgcatttagtgatcttttgccatatttgagtaataatctgatttttttgtttatagatttcttcttaaattaactttattcatcttgctaatttagtttcaaatagtgatttgtaatgatcagatttgatccatttctgtaattgctgaaattcccccgagttgctttttggctttaccgcctctggtctgggaggtgattgctctgctgcttcctgtaacttgcctgcctttctccctgtgtgggactcctgcgggtgagagcgtggctgaagacagccgtgttatgaaagggcctcctgtgctgtcgaggttgtgctctgtgaatgtcatcccctggtgcacagcagcaccttctacacaggatacagttggaatgccgccccctcgagttgtgtaaggcagcagccttggcccttgcacataagatgctgttgaatattctgcctgcaccaagtaaagggcacagatagaactgcttggcatatgttgctggggagatgagttttttgtaaagtatactacgttcttaagaatttggatcataaccatgggattttaataatagaaaaactgttgaagatcagtctggtcccttatttttacagtgaagaagccaaagcccagagaagggtgttaactttacaagtgtcagacagtagttagaacttggtggggtttttttttttttttttttgagatggagtcttgctctgttgcccaggctggagtgcagtggtgcgatctcagctcactgcaacctctgcctcccaggttcaagcgattctcctgcctcagcctactaagtagctgggactataggtgcgcaccaccacgcctagctaatttttgtattttttcagtagagacagggttttgctatgctggccaggctggtctcaaactcctgacctcagatgatccagccacctcagcttcccaaagtgctggggttccaggtgttagccaccatgcctggccatagacttgtttctgttcccttctcactgtggctgtaccaaggtgttgcttatcccagaagtcgtgatgcaggtcagcactttctccatgggaagttttagcagtgtttctttttagaatgtatttgggaactttaattcataatttagcttttttttcttcttcttataaataggctgtaccagtgcaggtcctcactttaatcctctatccagaaaacacggtgggccaaaggatgaagagaggtaacaagatgcttaactcttgtaataatggcgatagctttctggagttcatatggtatactacttgtaaatatgtgctaagataattccgtgtttcccccacctttgcttttgaacttgctgactcatctaaacccctgctcccaaatgctggaatgcttttacttcctgggcttaaaggaattgacaaatggggacacttaaaacgatttggttttgtagcatttattgaatatagaactaatacaagtgccaaaggggaactaatacaggaaatgtcatgaacagtactgtcaaccactagcaaaatcaatcatcattgtgaaacataggaagcttctgtagataaaaaaaaaaattgatactgaaaactagtcgagactccatttatatgtgtatgttttctgaaagcctttcagaaaaatattaaatttaaggacaagatttttatatcagaggccttgggacatagctttgttagctatgccagtaattaacaggcataactcagtaactgagagtttaccctttggtacttctgaaatcaggtgcagccccatctttcttcccagagcattagtgtgtagacgtgaagccttgtttgaagagctgtatttagaatgcctagctacttgtttgcaaatttgtgtctactcagtcaagttttaatttagctcatgaactaccttgatgtttagtggcatcagccctaatccatctgatgctttttcattattaggcatgttggagacttgggcaatgtgactgctgacaaagatggtgtggccgatgtgtctattgaagattctgtgatctcactctcaggagaccattgcatcattggccgcacactggtggtaagttttcataaaaggatatgcataaaacttcttctaacatacagtcatgtatcttttcactttgattgttagtcgcggtttctaaagatccagataaactgtacttgcagttcaaattaggaaaagcaattttattggacaattacggtgaaaatgaattattttatctaggtcagttaagaacactgttctgctaagatgcagtaaaaagcaggttacatttgaccatattagatctgagtttggaaaacagaagtagtctttagttttaaaatggccagattttcttgccaggattgggtttctcacttgttaaacagaacattttgttaagtttaaaacctgggatggacttaagtattcatgttcattcatgttcattcaggactgcaggttatcatgacttgtttaacttgtgggaagctgttgtcccaagttatcctggggaactgcatctggttcttgcaaaacaccaagtagacaggctctcttttacctccccttgagggcattaacattcagtagtcacttccattcagttaaccctttatttttatggtttttcttgagccatagttgtaaagcagaaaaatcatttataaaggtttgttgaacaaaattcaaaatactgttgcttaaagtattaagattttttaggattataccttacttataggcccgtcattcatttggcatgaaattttgagttttattcactttcactttcctttttttccaaagcaattaaaaaaactgccaaagtaagagtgactgcggaactaaggttactgtaacttaccatggaggattaagggtagcgtgtggtggtctacaacatagttatttgggttttagtatttcatttagacagcaacacttacctaatgtttaaaggtaatgtctttgcaacaccaagaaaaagctttgagtagtagtttctacttttaaactactaaatattagtatatctctctactaggattaatgttatttttctaatattatgaggttcttaaacatcttttgggtattgttgggaggaggtagtgattacttgacagcccaaagttatcttcttaaaattttttacaggtccatgaaaaagcagatgacttgggcaaaggtggaaatgaagaaagtacaaagacaggaaacgctggaagtcgtttggcttgtggtgtaattgggatcgcccaataaacattcccttggatgtagtctgaggccccttaactcatctgttatcctgctagctgtagaaatgtatcctgataaacattaaacactgtaatcttaaaagtgtaattgtgtgactttttcagagttgctttaaagtacctgtagtgagaaactgatttatgatcacttggaagatttgtatagttttataaaactcagttaaaatgtctgtttcaatgacctgtattttgccagacttaaatcacagatgggtattaaacttgtcagaatttctttgtcattcaagcctgtgaataaaaaccctgtatggcacttattatgaggctattaaaagaatccaaattcaaactaaa

SEQ ID NO: 4 - DNA, 2760 bp, Homo sapiens
atggaagtgcagttagggctgggaagggtctaccctcggccgccgtccaagacctaccgaggagctttccagaatctgttccagagcgtgcgcgaagtgatccagaacccgggccccaggcacccagaggccgcgagcgcagcacctcccggcgccagtttgctgctgctgcagcagcagcagcagcagcagcagcagcagcagcagcagcagcagcagcagcagcagcagcagcagcaagagactagccccaggcagcagcagcagcagcagggtgaggatggttctccccaagcccatcgtagaggccccacaggctacctggtcctggatgaggaacagcaaccttcacagccgcagtcggccctggagtgccaccccgagagaggttgcgtcccagagcctggagccgccgtggccgccagcaaggggctgccgcagcagctgccagcacctccggacgaggatgactcagctgccccatccacgttgtccctgctgggccccactttccccggcttaagcagctgctccgctgaccttaaagacatcctgagcgaggccagcaccatgcaactccttcagcaacagcagcaggaagcagtatccgaaggcagcagcagcgggagagcgagggaggcctcgggggctcccacttcctccaaggacaattacttagggggcacttcgaccatttctgacaacgccaaggagttgtgtaaggcagtgtcggtgtccatgggcctgggtgtggaggcgttggagcatctgagtccaggggaacagcttcggggggattgcatgtacgccccacttttgggagttccacccgctgtgcgtcccactccttgtgccccattggccgaatgcaaaggttctctgctagacgacagcgcaggcaagagcactgaagatactgctgagtattcccctttcaagggaggttacaccaaagggctagaaggcgagagcctaggctgctctggcagcgctgcagcagggagctccgggacacttgaactgccgtctaccctgtctctctacaagtccggagcactggacgaggcagctgcgtaccagagtcgcgactactacaactttccactggctctggccggaccgccgccccctccgccgcctccccatccccacgctcgcatcaagctggagaacccgctggactacggcagcgcctgggcggctgcggcggcgcagtgccgctatggggacctggcgagcctgcatggcgcgggtgcagcgggacccggttctgggtcaccctcagccgccgcttcctcatcctggcacactctcttcacagccgaagaaggccagttgtatggaccgtgtggtggtggtgggggtggtggcggcggcggcggcggcggcggcggcggcggcggcggcggcggcggcggcgaggcgggagctgtagccccctacggctacactcggccccctcaggggctggcgggccaggaaagcgacttcaccgcacctgatgtgtggtaccctggcggcatggtgagcagagtgccctatcccagtcccacttgtgtcaaaagcgaaatgggcccctggatggatagctactccggaccttacggggacatgcgtttggagactgccagggaccatgttttgcccattgactattactttccaccccagaagacctgcctgatctgtggagatgaagcttctgggtgtcactatggagctctcacatgtggaagctgcaaggtcttcttcaaaagagccgctgaagggaaacagaagtacctgtgcgccagcagaaatgattgcactattgataaattccgaaggaaaaattgtccatcttgtcgtcttcggaaatgttatgaagcagggatgactctgggagcccggaagctgaagaaacttggtaatctgaaactacaggaggaaggagaggcttccagcaccaccagccccactgaggagacaacccagaagctgacagtgtcacacattgaaggctatgaatgtcagcccatctttctgaatgtcctggaagccattgagccaggtgtagtgtgtgctggacacgacaacaaccagcccgactcctttgcagccttgctctctagcctcaatgaactgggagagagacagcttgtacacgtggtcaagtgggccaaggccttgcctggcttccgcaacttacacgtggacgaccagatggctgtcattcagtactcctggatggggctcatggtgtttgccatgggctggcgatccttcaccaatgtcaactccaggatgctctacttcgcccctgatctggttttcaatgagtaccgcatgcacaagtcccggatgtacagccagtgtgtccgaatgaggcacctctctcaagagtttggatggctccaaatcaccccccaggaattcctgtgcatgaaagcactgctactcttcagcattattccagtggatgggctgaaaaatcaaaaattctttgatgaacttcgaatgaactacatcaaggaactcgatcgtatcattgcatgcaaaagaaaaaatcccacatcctgctcaagacgcttctaccagctcaccaagctcctggactccgtgcagcctattgcgagagagctgcatcagttcacttttgacctgctaatcaagtcacacatggtgagcgtggactttccggaaatgatggcagagatcatctctgtgcaagtgcccaagatcctttctgggaaagtcaagcccatctatttccacacccag

SEQ ID NO: 5 - RNA, 23 nt, Artificial Sequence
  Description of Artificial Sequence: Synthetic oligonucleotide
uuaaaggaaaguaauggaccagu

SEQ ID NO: 6 - RNA, 23 nt, Artificial Sequence
  Description of Artificial Sequence: Synthetic oligonucleotide
uaaauaggcuguaccagugcagg

SEQ ID NO: 7 - RNA, 23 nt, Artificial Sequence
  Description of Artificial Sequence: Synthetic oligonucleotide
uucauuauuaggcauguuggaga

SEQ ID NO: 8 - RNA, 23 nt, Artificial Sequence
  Description of Artificial Sequence: Synthetic oligonucleotide
aaauaggcuguaccagugcaggu

SEQ ID NO: 9 - RNA, 23 nt, Artificial Sequence
  Description of Artificial Sequence: Synthetic oligonucleotide
uauuaggcauguuggagacuugg

SEQ ID NO: 10 - RNA, 23 nt, Artificial Sequence
  Description of Artificial Sequence: Synthetic oligonucleotide
acuuaccgcauguccccguaagg

SEQ ID NO: 11 - RNA, 23 nt, Artificial Sequence
  Description of Artificial Sequence: Synthetic oligonucleotide
agugcaguuagggcugggaaggg

SEQ ID NO: 12 - RNA, 23 nt, Artificial Sequence
  Description of Artificial Sequence: Synthetic oligonucleotide
aagugcaguuagggcugggaagg

SEQ ID NO: 13 - protein, 304 aa, Homo sapiens
MGVFCLGPWGLGRKLRTPGKGPLQLLSRLCGDHLQAIPAKKAPAGQEEPGTPPSSPLSAEQLDRIQRNKAAALLRLAARNVPVGFGESWKKHLSGEFGKPYFIKLMGFVAEERKHYTVYPPPHQVFTWTQMCDIKDVKVVILGQDPYHGPNQAHGLCFSVQRPVPPPPSLENIYKELSTDIEDFVHPGHGDLSGWAKQGVLLLNAVLTVRAHQANSHKERGWEQFTDAVVSWLNQNSNGLVFLLWGSYAQKKGSAIDRKRHHVLQTAHPSPLSVYRGFFGCRHFSKTNELLQKSGKKPIDWKEL

SEQ ID NO: 14 - protein, 313 aa, Homo sapiens
MIGQKTLYSFFSPSPARKRHAPSPEPAVQGTGVAGVPEESGDAAAIPAKKAPAGQEEPGTPPSSPLSAEQLDRIQRNKAAALLRLAARNVPVGFGESWKKHLSGEFGKPYFIKLMGFVAEERKHYTVYPPPHQVFTWTQMCDIKDVKVVILGQDPYHGPNQAHGLCFSVQRPVPPPPSLENIYKELSTDIEDFVHPGHGDLSGWAKQGVLLLNAVLTVRAHQANSHKERGWEQFTDAVVSWLNQNSNGLVFLLWGSYAQKKGSAIDRKRHHVLQTAHPSPLSVYRGFFGCRHFSKTNELLQKSGKKPIDWKEL

SEQ ID NO: 15 - protein, 167 aa, Artificial Sequence
  Description of Artificial Sequence: Synthetic polypeptide
MSEVEFSHEYWMRHALTLAKRARDEREVPVGAVLVLNNRVIGEGWNRAIGLHDPTAHAEIMALRQGGLVMQNYRLIDATLYVTFEPCVMCAGAMIHSRIGRVVFGVRNAKTGAAGSLMDVLHYPGMNHRVEITEGILADECAALLCYFFRMPRQVFNAQKKAQSSTD

SEQ ID NO: 16 - protein, 167 aa, Artificial Sequence
  Description of Artificial Sequence: Synthetic polypeptide
MSEVEFSHEYWMRHALTLAKRARDEREVPVGAVLVLNNRVIGEGWNRAIGLHDPTAHAEIMALRQGGLVMQNYRLIDATLYVTFEPCVMCAGAMIHSRIGRVVFGVRNAKTGAAGSLMDVLHYPGMNHRVEITEGILADECAALLCTFFRMPRQVFNAQKKAQSSTD

SEQ ID NO: 17 - protein, 178 aa, Escherichia coli
MRRAFITGVFFLSEVEFSHEYWMRHALTLAKRAWDEREVPVGAVLVHNNRVIGEGWNRPIGRHDPTAHAEIMALRQGGLVMQNYRLIDATLYVTLEPCVMCAGAMIHSRIGRVVFGARDAKTGAAGSLMDVLHHPGMNHRVEITEGILADECAALLSDFFRMRRQEIKAQKKAQSSTD

SEQ ID NO: 18 - protein, 160 aa, Staphylococcus aureus
MGSHMTNDIYFMTLAIEEAKKAAQLGEVPIGAIITKDDEVIARAHNLRETLQQPTAHAEHIAIERAAKVLGSWRLEGCTLYVTLEPCVMCAGTIVMSRIPRVVYGADDPKGGCSGSLMNLLQQSNFNHRAIVDKGVLKEACSTLLTTFFKNLRANKKSTN

SEQ ID NO: 19 - protein, 161 aa, Bacillus subtilis
MTQDELYMKEAIKEAKKAEEKGEVPIGAVLVINGEIIARAHNLRETEQRSIAHAEMLVIDEACKALGTWRLEGATLYVTLEPCPMCAGAVVLSRVEKVVFGAFDPKGGCSGTLMNLLQEERFNHQAEVVSGVLEEECGGMLSAFFRELRKKKKAARKNLSE

SEQ ID NO: 20 - protein, 183 aa, Salmonella typhimurium
MPPAFITGVTSLSDVELDHEYWMRHALTLAKRAWDEREVPVGAVLVHNHRVIGEGWNRPIGRHDPTAHAEIMALRQGGLVLQNYRLLDTTLYVTLEPCVMCAGAMVHSRIGRVVFGARDAKTGAAGSLIDVLHHPGMNHRVEIIEGVLRDECATLLSDFFRMRRQEIKALKKADRAEGAGPAV

SEQ ID NO: 21 - protein, 164 aa, Shewanella putrefaciens
MDEYWMQVAMQMAEKAEAAGEVPVGAVLVKDGQQIATGYNLSISQHDPTAHAEILCLRSAGKKLENYRLLDATLYITLEPCAMCAGAMVHSRIARVVYGARDEKTGAAGTVVNLLQHPAFNHQVEVTSGVLAEACSAQLSRFFKRRRDEKKALKLAQRAQQGIE

SEQ ID NO: 22 - protein, 173 aa, Haemophilus influenzae
MDAAKVRSEFDEKMMRYALELADKAEALGEIPVGAVLVDDARNIIGEGWNLSIVQSDPTAHAEIIALRNGAKNIQNYRLLNSTLYVTLEPCTMCAGAILHSRIKRLVFGASDYKTGAIGSRFHFFDDYKMNHTLEITSGVLAEECSQKLSTFFQKRREEKKIEKALLKSLSDK

SEQ ID NO: 23 - protein, 161 aa, Caulobacter crescentus
MRTDESEDQDHRMMRLALDAARAAAEAGETPVGAVILDPSTGEVIATAGNGPIAAHDPTAHAEIAAMRAAAAKLGNYRLTDLTLVVTLEPCAMCAGAISHARIGRVVFGADDPKGGAVVHGPKFFAQPTCHWRPEVTGGVLADESADLLRGFFRARRKAKI

SEQ ID NO: 24 - protein, 179 aa, Geobacter sulfurreducens
MSSLKKTPIRDDAYWMGKAIREAAKAAARDEVPIGAVIVRDGAVIGRGHNLREGSNDPSAHAEMIAIRQAARRSANWRLTGATLYVTLEPCLMCMGAIILARLERVVFGCYDPKGGAAGSLYDLSADPRLNHQVRLSPGVCQEECGTMLSDFFRDLRRRKKAKATPALFIDERKVPPEP

SEQ ID NO: 25 - protein, 186 aa, Artificial Sequence
  Description of Artificial Sequence: Synthetic polypeptide
GSSGSETPGTSESATPESSGSEVEFSHEYWMRHALTLAKRARDEREVPVGAVLVLNNRVIGEGWNRAIGLHDPTAHAEIMALRQGGLVMQNYRLIDATLYVTFEPCVMCAGAMIHSRIGRVVFGVRNAKTGAAGSLMDVLHYPGMNHRVEITEGILADECAALLCYFFRMPRQVFNAQKKAQSSTD

SEQ ID NO: 26 - protein, 186 aa, Artificial Sequence
  Description of Artificial Sequence: Synthetic polypeptide
TAHAEIMALRQGGLVMQNYRLIDATLYVTFEPCVMCAGAMIHSRIGRVVFGVRNAKTGAAGSLMDVLHYPGMNHRVEITEGILADECAALLCYFFRMPRQVFNAQKKAQSSTDGSSGSETPGTSESATPESSGSEVEFSHEYWMRHALTLAKRARDEREVPVGAVLVLNNRVIGEGWNRAIGLHDP

SEQ ID NO: 27 - protein, 186 aa, Artificial Sequence
  Description of Artificial Sequence: Synthetic polypeptide
YRLIDATLYVTFEPCVMCAGAMIHSRIGRVVFGVRNAKTGAAGSLMDVLHYPGMNHRVEITEGILADECAALLCYFFRMPRQVFNAQKKAQSSTDGSSGSETPGTSESATPESSGSEVEFSHEYWMRHALTLAKRARDEREVPVGAVLVLNNRVIGEGWNRAIGLHDPTAHAEIMALRQGGLVMQN

SEQ ID NO: 28 - protein, 186 aa, Artificial Sequence
  Description of Artificial Sequence: Synthetic polypeptide
MNHRVEITEGILADECAALLCYFFRMPRQVFNAQKKAQSSTDGSSGSETPGTSESATPESSGSEVEFSHEYWMRHALTLAKRARDEREVPVGAVLVLNNRVIGEGWNRAIGLHDPTAHAEIMALRQGGLVMQNYRLIDATLYVTFEPCVMCAGAMIHSRIGRVVFGVRNAKTGAAGSLMDVLHYPG

SEQ ID NO: 29 - protein, 176 aa, Artificial Sequence
  Description of Artificial Sequence: Synthetic polypeptide
GSSGSETPGTSESATPESSGSEVEFSHEYWMRHALTLAKRARDEREVPVGAVLVLNNRVIGEGWNRAIGLHDPTAHAEIMALRQGGLVMQNYRLIDATLYVTFEPCVMCAGAMIHSRIGRVVFGVRNAKTGAAGSLMDVLHYPGMNHRVEITEGILADECAALLCYFFRMPRQVFN

SEQ ID NO: 30 - protein, 173 aa, Artificial Sequence
  Description of Artificial Sequence: Synthetic polypeptide
GSSGSETPGTSESATPESSGSEVEFSHEYWMRHALTLAKRARDEREVPVGAVLVLNNRVIGEGWNRAIGLHDPTAHAEIMALRQGGLVMQNYRLIDATLYVTFEPCVMCAGAMIHSRIGRVVFGVRNAKTGAAGSLMDVLHYPGMNHRVEITEGILADECAALLCYFFRMPRQ

SEQ ID NO: 31 - protein, 168 aa, Artificial Sequence
  Description of Artificial Sequence: Synthetic polypeptide
GSSGSETPGTSESATPESSGSEVEFSHEYWMRHALTLAKRARDEREVPVGAVLVLNNRVIGEGWNRAHAEIMALRQGGLVMQNYRLIDATLYVTFEPCVMCAGAMIHSRIGRVVFGVRNAKTGAAGSLMDVLHYPGMNHRVEITEGILADECAALLCYFFRMPRQVFN

SEQ ID NO: 32 - protein, 178 aa, Artificial Sequence
  Description of Artificial Sequence: Synthetic polypeptide
GSSGSETPGTSESATPESSGSEVEFSHEYWMRHALTLAKRARDEREVPVGAVLVLNNRVIGEGWNRAHAEIMALRQGGLVMQNYRLIDATLYVTFEPCVMCAGAMIHSRIGRVVFGVRNAKTGAAGSLMDVLHYPGMNHRVEITEGILADECAALLCYFFRMPRQVFNAQKKAQSSTD

SEQ ID NO: 33 - protein, 1410 aa, Artificial Sequence
  Description of Artificial Sequence: Synthetic polypeptide
EIGKATAKYFFYSNIMNFFKTEITLANGEIRKRPLIETNGETGEIVWDKGRDFATVRKVLSMPQVNIVKKTEVQTGGFSKESILPKRNSDKLIARKKDWDPKKYGGFMQPTVAYSVLVVAKVEKGKSKKLKSVKELLGITIMERSSFEKNPIDFLEAKGYKEVKKDLIIKLPKYSLFELENGRKRMLASAKFLQKGNELALPSKYVNFLYLASHYEKLKGSPEDNEQKQLFVEQHKHYLDEIIEQISEFSKRVILADANLDKVLSAYNKHRDKPIREQAENIIHLFTLTNLGAPRAFKYFDTTIARKEYRSTKEVLDATLIHQSITGLYETRIDLSQLGGDGGSGGSGGSGGSGGSGGSGGMDKKYSIGLAIGTNSVGWAVITDEYKVPSKKFKVLGNTDRHSIKKNLIGALLFDSGETAEATRLKRTARRRYTRRKNRICYLQEIFSNEMAKVDDSFFHRLEESFLVEEDKKHERHPIFGNIVDEVAYHEKYPTIYHLRKKLVDSTDKADLRLIYLALAHMIKFRGHFLIEGDLNPDNSDVDKLFIQLVQTYNQLFEENPINASGVDAKAILSARLSKSRRLENLIAQLPGEKKNGLFGNLIALSLGLTPNFKSNFDLAEDAKLQLSKDTYDDDLDNLLAQIGDQYADLFLAAKNLSDAILLSDILRVNTEITKAPLSASMIKRYDEHHQDLTLLKALVRQQLPEKYKEIFFDQSKNGYAGYIDGGASQEEFYKFIKPILEKMDGTEELLVKLNREDLLRKQRTFDNGSIPHQIHLGELHAILRRQEDFYPFLKDNREKIEKILTFRIPYYVGPLARGNSRFAWMTRKSEETITPWNFEEVVDKGASAQSFIERMTNFDKNLPNEKVLPKHSLLYEYFTVYNELTKVKYVTEGMRKPAFLSGEQKKAIVDLLFKTNRKVTVKQLKEDYFKKIECFDSVEISGVEDRFNASLGTYHDLLKIIKDKDFLDNEENEDILEDIVLTLTLFEDREMIEERLKTYAHLFDDKVMKQLKRRRYTGWGRLSRKLINGIRDKQSGKTILDFLKSDGFANRNFMQLIHDDSLTFKEDIQKAQVSGQGDSLHEHIANLAGSPAIKKGILQTVKVVDELVKVMGRHKPENIVIEMARENQTTQKGQKNSRERMKRIEEGIKELGSQILKEHPVENTQLQNEKLYLYYLQNGRDMYVDQELDINRLSDYDVDHIVPQSFLKDDSIDNKVLTRSDKNRGKSDNVPSEEVVKKMKNYWRQLLNAKLITQRKFDNLTKAERGGLSELDKAGFIKRQLVETRQITKHVAQILDSRMNTKYDENDKLIREVKVITLKSKLVSDFRKDFQFYKVREINNYHHAHDAYLNAVVGTALIKKYPKLESEFVYGDYKVYDVRKMIAKSEQEGADKRTADGSEFESPKKKRKV

SEQ ID NO: 34 - DNA, 8877 bp, Artificial Sequence
  Description of Artificial Sequence: Synthetic polynucleotide
atatgccaagtacgccccctattgacgtcaatgacggtaaatggcccgcctggcattatgcccagtacatgaccttatgggactttcctacttggcagtacatctacgtattagtcatcgctattaccatggtgatgcggttttggcagtacatcaatgggcgtggatagcggtttgactcacggggatttccaagtctccaccccattgacgtcaatgggagtttgttttggcaccaaaatcaacgggactttccaaaatgtcgtaacaactccgccccattgacgcaaatgggcggtaggcgtgtacggtgggaggtctatataagcagagctggtttagtgaaccgtcagatccgctagagatccgcggccgctaatacgactcactatagggagagccgccaccatgagctcagagactggcccagtggctgtggaccccacattgagacggcggatcgagccccatgagtttgaggtattcttcgatccgagagagctccgcaaggagacctgcctgctttacgaaattaattgggggggccggcactccatttggcgacatacatcacagaacactaacaagcacgtcgaagtcaacttcatcgagaagttcacgacagaaagatatttctgtccgaacacaaggtgcagcattacctggtttctcagctggagcccatgcggcgaatgtagtagggccatcactgaattcctgtcaaggtatccccacgtcactctgtttatttacatcgcaaggctgtaccaccacgctgacccccgcaatcgacaaggcctgcgggatttgatctcttcaggtgtgactatccaaattatgactgagcaggagtcaggatactgctggagaaactttgtgaattatagcccgagtaatgaagcccactggcctaggtatccccatctgtgggtacgactgtacgttcttgaactgtactgcatcatactgggcctgcctccttgtctcaacattctgagaaggaagcagccacagctgacattctttaccatcgctcttcagtcttgtcattaccagcgactgcccccacacattctctgggccaccgggttgaaatctggtggttcttctggtggttctagcggcagcgagactcccgggacctcagagtccgccacacccgaaagttctggtggttcttctggtggttctgataaaaagtattctattggtttagccatcggcactaattccgttggatgggctgtcataaccgatgaatacaaagtaccttcaaagaaatttaaggtgttggggaacacagaccgtcattcgattaaaaagaatcttatcggtgccctcctattcgatagtggcgaaacggcagaggcgactcgcctgaaacgaaccgctcggagaaggtatacacgtcgcaagaaccgaatatgttacttacaagaaatttttagcaatgagatggccaaagttgacgattctttctttcaccgtttggaagagtccttccttgtcgaagaggacaagaaacatgaacggcaccccatctttggaaacatagtagatgaggtggcatatcatgaaaagtacccaacgatttatcacctcagaaaaaagctagttgactcaactgataaagcggacctgaggttaatctacttggctcttgcccatatgataaagttccgtgggcactttctcattgagggtgatctaaatccggacaactcggatgtcgacaaactgttcatccagttagtacaaacctataatcagttgtttgaagagaaccctataaatgcaagtggcgtggatgcgaaggctattcttagcgcccgcctctctaaatcccgacggctagaaaacctgatcgcacaattacccggagagaagaaaaatgggttgttcggtaaccttatagcgctctcactaggcctgacaccaaattttaagtcgaacttcgacttagctgaagatgccaaattgcagcttagtaaggacacgtacgatgacgatctcgacaatctactggcacaaattggagatcagtatgcggacttatttttggctgccaaaaaccttagcgatgcaatcctcctatctgacatactgagagttaatactgagattaccaaggcgccgttatccgcttcaatgatcaaaaggtacgatgaacatcaccaagacttgacacttctcaaggccctagtccgtcagcaactgcctgagaaatataaggaaatattctttgatcagtcgaaaaacgggtacgcaggttatattgacggcggagcgagtcaagaggaattctacaagtttatcaaacccatattagagaagatggatgggacggaagagttgcttgtaaaactcaatcgcgaagatctactgcgaaagcagcggactttcgacaacggtagcattccacatcaaatccacttaggcgaattgcatgctatacttagaaggcaggaggatttttatccgttcctcaaagacaatcgtgaaaagattgagaaaatcctaacctttcgcataccttactatgtgggacccctggcccgagggaactctcggttcgcatggatgacaagaaagtccgaagaaacgattactccatggaattttgaggaagttgtcgataaaggtgcgtcagctcaatcgttcatcgagaggatgaccaactttgacaagaatttaccgaacgaaaaagtattgcctaagcacagtttactttacgagtatttcacagtgtacaatgaactcacgaaagttaagtatgtcactgagggcatgcgtaaacccgcctttctaagcggagaacagaagaaagcaatagtagatctgttattcaagaccaaccgcaaagtgacagttaagcaattgaaagaggactactttaagaaaattgaatgcttcgattctgtcgagatctccggggtagaagatcgatttaatgcgtcacttggtacgtatcatgacctcctaaagataattaaagataaggacttcctggataacgaagagaatgaagatatcttagaagatatagtgttgactcttaccctctttgaagatcgggaaatgattgaggaaagactaaaaacatacgctcacctgttcgacgataaggttatgaaacagttaaagaggcgtcgctatacgggctggggacgattgtcgcggaaacttatcaacgggataagagacaagcaaagtggtaaaactattctcgattttctaaagagcgacggcttcgccaataggaactttatgcagctgatccatgatgactctttaaccttcaaagaggatatacaaaaggcacaggtttccggacaaggggactcattgcacgaacatattgcgaatcttgctggttcgccagccatcaaaaagggcatactccagacagtcaaagtagtggatgagctagttaaggtcatgggacgtcacaaaccggaaaacattgtaatcgagatggcacgcgaaaatcaaacgactcagaaggggcaaaaaaacagtcgagagcggatgaagagaatagaagagggtattaaagaactgggcagccagatcttaaaggagcatcctgtggaaaatacccaattgcagaacgagaaactttacctctattacctacaaaatggaagggacatgtatgttgatcaggaactggacataaaccgtttatctgattacgacgtcgatcacattgtaccccaatcctttttgaaggacgattcaatcgacaataaagtgcttacacgctcggataagaaccgagggaaaagtgacaatgttccaagcgaggaagtcgtaaagaaaatgaagaactattggcggcagctcctaaatgcgaaactgataacgcaaagaaagttcgataacttaactaaagctgagaggggtggcttgtctgaacttgacaaggccggatttattaaacgtcagctcgtggaaacccgccaaatcacaaagcatgttgcacagatactagattcccgaatgaatacgaaatacgacgagaacgataagctgattcgggaagtcaaagtaatcactttaaagtcaaaattggtgtcggacttcagaaaggattttcaattctataaagttagggagataaataactaccaccatgcgcacgacgcttatcttaatgccgtcgtagggaccgcactcattaagaaatacccgaagctagaaagtgagtttgtgtatggtgattacaaagtttatgacgtccgtaagatgatcgcgaaaagcgaacaggagataggcaaggctacagccaaatacttcttttattctaacattatgaatttctttaagacggaaatcactctggcaaacggagagatacgcaaacgacctttaattgaaaccaatggggagacaggtgaaatcgtatgggataagggccgggacttcgcgacggtgagaaaagttttgtccatgccccaagtcaacatagtaaagaaaactgaggtgcagaccggagggttttcaaaggaatcgattcttccaaaaaggaatagtgataagctcatcgctcgtaaaaaggactgggacccgaaaaagtacggtggcttcgatagccctacagttgcctattctgtcctagtagtggcaaaagttgagaagggaaaatccaagaaactgaagtcagtcaaagaattattggggataacgattatggagcgctcgtcttttgaaaagaaccccatcgacttccttgaggcgaaaggttacaaggaagtaaaaaaggatctcataattaaactaccaaagtatagtctgtttgagttagaaaatggccgaaaacggatgttggctagcgccggagagcttcaaaaggggaacgaactcgcactaccgtctaaatacgtgaatttcctgtatttagcgtcccattacgagaagttgaaaggttcacctgaagataacgaacagaagcaactttttgttgagcagcacaaacattatctcgacgaaatcatagagcaaatttcggaattcagtaagagagtcatcctagctgatgccaatctggacaaagtattaagcgcatacaacaagcacagggataaacccatacgtgagcaggcggaaaatattatccatttgtttactcttaccaacctcggcgctccagccgcattcaagtattttgacacaacgatagatcgcaaacgatacacttctaccaaggaggtgctagacgcgacactgattcaccaatccatcacgggattatatgaaactcggatagatttgtcacagcttgggggtgactctggtggttctggaggatctggtggttctactaatctgtcagatattattgaaaaggagaccggtaagcaactggttatccaggaatccatcctcatgctcccagaggaggtggaagaagtcattgggaacaagccggaaagcgatatactcgtgcacaccgcctacgacgagagcaccgacgagaatgtcatgcttctgactagcgacgcccctgaatacaagccttgggctctggtcatacaggatagcaacggtgagaacaagattaagatgctctctggtggttctggaggatctggtggttctactaatctgtcagatattattgaaaaggagaccggtaagcaactggttatccaggaatccatcctcatgctcccagaggaggtggaagaagtcattgggaacaagccggaaagcgatatactcgtgcacaccgcctacgacgagagcaccgacgagaatgtcatgcttctgactagcgacgcccctgaatacaagccttgggctctggtcatacaggatagcaacggtgagaacaagattaagatgctctctggtggttctcccaagaagaagaggaaagtctaaccggtcatcatcaccatcaccattgagtttaaacccgctgatcagcctcgactgtgccttctagttgccagccatctgttgtttgcccctcccccgtgccttccttgaccctggaaggtgccactcccactgtcctttcctaataaaatgaggaaattgcatcgcattgtctgagtaggtgtcattctattctggggggtggggtggggcaggacagcaagggggaggattgggaagacaatagcaggcatgctggggatgcggtgggctctatggcttctgaggcggaaagaaccagctggggctcgataccgtcgacctctagctagagcttggcgtaatcatggtcatagctgtttcctgtgtgaaattgttatccgctcacaattccacacaacatacgagccggaagcataaagtgtaaagcctagggtgcctaatgagtgagctaactcacattaattgcgttgcgctcactgcccgctttccagtcgggaaacctgtcgtgccagctgcattaatgaatcggccaacgcgcggggagaggcggtttgcgtattgggcgctcttccgcttcctcgctcactgactcgctgcgctcggtcgttcggctgcggcgagcggtatcagctcactcaaaggcggtaatacggttatccacagaatcaggggataacgcaggaaagaacatgtgagcaaaaggccagcaaaaggccaggaaccgtaaaaaggccgcgttgctggcgtttttccataggctccgcccccctgacgagcatcacaaaaatcgacgctcaagtcagaggtggcgaaacccgacaggactataaagataccaggcgtttccccctggaagctccctcgtgcgctctcctgttccgaccctgccgcttaccggatacctgtccgcctttctcccttcgggaagcgtggcgctttctcatagctcacgctgtaggtatctcagttcggtgtaggtcgttcgctccaagctgggctgtgtgcacgaaccccccgttcagcccgaccgctgcgccttatccggtaactatcgtcttgagtccaacccggtaagacacgacttatcgccactggcagcagccactggtaacaggattagcagagcgaggtatgtaggcggtgctacagagttcttgaagtggtggcctaactacggctacactagaagaacagtatttggtatctgcgctctgctgaagccagttaccttcggaaaaagagttggtagctcttgatccggcaaacaaaccaccgctggtagcggtggtttttttgtttgcaagcagcagattacgcgcagaaaaaaaggatctcaagaagatcctttgatcttttctacggggtctgacgctcagtggaacgaaaactcacgttaagggattttggtcatgagattatcaaaaaggatcttcacctagatccttttaaattaaaaatgaagttttaaatcaatctaaagtatatatgagtaaacttggtctgacagttaccaatgcttaatcagtgaggcacctatctcagcgatctgtctatttcgttcatccatagttgcctgactccccgtcgtgtagataactacgatacgggagggcttaccatctggccccagtgctgcaatgataccgcgagacccacgctcaccggctccagatttatcagcaataaaccagccagccggaagggccgagcgcagaagtggtcctgcaactttatccgcctccatccagtctattaattgttgccgggaagctagagtaagtagttcgccagttaatagtttgcgcaacgttgttgccattgctacaggcatcgtggtgtcacgctcgtcgtttggtatggcttcattcagctccggttcccaacgatcaaggcgagttacatgatcccccatgttgtgcaaaaaagcggttagctccttcggtcctccgatcgttgtcagaagtaagttggccgcagtgttatcactcatggttatggcagcactgcataattctcttactgtcatgccatccgtaagatgcttttctgtgactggtgagtactcaaccaagtcattctgagaatagtgtatgcggcgaccgagttgctcttgcccggcgtcaatacgggataataccgcgccacatagcagaactttaaaagtgctcatcattggaaaacgttcttcggggcgaaaactctcaaggatcttaccgctgttgagatccagttcgatgtaacccactcgtgcacccaactgatcttcagcatcttttactttcaccagcgtttctgggtgagcaaaaacaggaaggcaaaatgccgcaaaaaagggaataagggcgacacggaaatgttgaatactcatactcttcctttttcaatattattgaagcatttatcagggttattgtctcatgagcggatacatatttgaatgtatttagaaaaataaacaaataggggttccgcgcacatttccccgaaaagtgccacctgacgtcgacggatcgggagatcgatctcccgatcccctagggtcgactctcagtacaatctgctctgatgccgcatagttaagccagtatctgctccctgcttgtgtgttggaggtcgctgagtagtgcgcgagcaaaatttaagctacaacaaggcaaggcttgaccgacaattgcatgaagaatctgcttagggttaggcgttttgcgctgcttcgcgatgtacgggccagatatacgcgttgacattgattattgactagttattaatagtaatcaattacggggtcattagttcatagcccatatatggagttccgcgttacataacttacggtaaatggcccgcctggctgaccgcccaacgacccccgcccattgacgtcaataatgacgtatgttcccatagtaacgccaatagggactttccattgacgtcaatgggtggagtatttacggtaaactgcccacttggcagtacatcaagtgtatc

SEQ ID NO: 35 - protein, 1824 aa, Artificial Sequence
  Description of Artificial Sequence: Synthetic polypeptide
MSSETGPVAVDPTLRRRIEPHEFEVFFDPRELRKETCLLYEINWGGRHSIWRHTSQNTNKHVEVNFIEKFTTERYFCPNTRCSITWFLSWSPCGECSRAITEFLSRYPHVTLFIYIARLYHHADPRNRQGLRDLISSGVTIQIMTEQESGYCWRNFVNYSPSNEAHWPRYPHLWVRLYVLELYCIILGLPPCLNILRRKQPQLTFFTIALQSCHYQRLPPHILWATGLKSGGSSGGSSGSETPGTSESATPESSGGSSGGSDKKYSIGLAIGTNSVGWAVITDEYKVPSKKFKVLGNTDRHSIKKNLIGALLFDSGETAEATRLKRTARRRYTRRKNRICYLQEIFSNEMAKVDDSFFHRLEESFLVEEDKKHERHPIFGNIVDEVAYHEKYPTIYHLRKKLVDSTDKADLRLIYLALAHMIKFRGHFLIEGDLNPDNSDVDKLFIQLVQTYNQLFEENPINASGVDAKAILSARLSKSRRLENLIAQLPGEKKNGLFGNLIALSLGLTPNFKSNFDLAEDAKLQLSKDTYDDDLDNLLAQIGDQYADLFLAAKNLSDAILLSDILRVNTEITKAPLSASMIKRYDEHHQDLTLLKALVRQQLPEKYKEIFFDQSKNGYAGYIDGGASQEEFYKFIKPILEKMDGTEELLVKLNREDLLRKQRTFDNGSIPHQIHLGELHAILRRQEDFYPFLKDNREKIEKILTFRIPYYVGPLARGNSRFAWMTRKSEETITPWNFEEVVDKGASAQSFIERMTNFDKNLPNEKVLPKHSLLYEYFTVYNELTKVKYVTEGMRKPAFLSGEQKKAIVDLLFKTNRKVTVKQLKEDYFKKIECFDSVEISGVEDRFNASLGTYHDLLKIIKDKDFLDNEENEDILEDIVLTLTLFEDREMIEERLKTYAHLFDDKVMKQLKRRRYTGWGRLSRKLINGIRDKQSGKTILDFLKSDGFANRNFMQLIHDDSLTFKEDIQKAQVSGQGDSLHEHIANLAGSPAIKKGILQTVKVVDELVKVMGRHKPENIVIEMARENQTTQKGQKNSRERMKRIEEGIKELGSQILKEHPVENTQLQNEKLYLYYLQNGRDMYVDQELDINRLSDYDVDHIVPQSFLKDDSIDNKVLTRSDKNRGKSDNVPSEEVVKKMKNYWRQLLNAKLITQRKFDNLTKAERGGLSELDKAGFIKRQLVETRQITKHVAQILDSRMNTKYDENDKLIREVKVITLKSKLVSDFRKDFQFYKVREINNYHHAHDAYLNAVVGTALIKKYPKLESEFVYGDYKVYDVRKMIAKSEQEIGKATAKYFFYSNIMNFFKTEITLANGEIRKRPLIETNGETGEIVWDKGRDFATVRKVLSMPQVNIVKKTEVQTGGFSKESILPKRNSDKLIARKKDWDPKKYGGFDSPTVAYSVLVVAKVEKGKSKKLKSVKELLGITIMERSSFEKNPIDFLEAKGYKEVKKDLIIKLPKYSLFELENGRKRMLASAGELQKGNELALPSKYVNFLYLASHYEKLKGSPEDNEQKQLFVEQHKHYLDEIIEQISEFSKRVILADANLDKVLSAYNKHRDKPIREQAENIIHLFTLTNLGAPAAFKYFDTTIDRKRYTSTKEVLDATLIHQSITGLYETRIDLSQLGGDSGGSGGSGGSTNLSDIIEKETGKQLVIQESILMLPEEVEEVIGNKPESDILVHTAYDESTDENVMLLTSDAPEYKPWALVIQDSNGENKIKMLSGGSGGSGGSTNLSDIIEKETGKQLVIQESILMLPEEVEEVIGNKPESDILVHTAYDESTDENVMLLTSDAPEYKPWALVIQDSNGENKIKMLSGGSPKKKRK

SEQ ID NO: 36 - DNA, 8811 bp, Artificial Sequence
  Description of Artificial Sequence: Synthetic polynucleotide
atatgccaagtacgccccctattgacgtcaatgacggtaaatggcccgcctggcattatgcccagtacatgaccttatgggactttcctacttggcagtacatctacgtattagtcatcgctattaccatggtgatgcggttttggcagtacatcaatgggcgtggatagcggtttgactcacggggatttccaagtctccaccccattgacgtcaatgggagtttgttttggcaccaaaatcaacgggactttccaaaatgtcgtaacaactccgccccattgacgcaaatgggcggtaggcgtgtacggtgggaggtctatataagcagagctggtttagtgaaccgtcagatccgctagagatccgcggccgctaatacgactcactatagggagagccgccaccatgaaacggacagccgacggaagcgagttcgagtcaccaaagaagaagcggaaagtctctgaagtcgagtttagccacgagtattggatgaggcacgcactgaccctggcaaagcgagcatgggatgaaagagaagtccccgtgggcgccgtgctggtgcacaacaatagagtgatcggagagggatggaacaggccaatcggccgccacgaccctaccgcacacgcagagatcatggcactgaggcagggaggcctggtcatgcagaattaccgcctgatcgatgccaccctgtatgtgacactggagccatgcgtgatgtgcgcaggagcaatgatccacagcaggatcggaagagtggtgttcggagcacgggacgccaagaccggcgcagcaggctccctgatggatgtgctgcaccaccccggcatgaaccaccgggtggagatcacagagggaatcctggcagacgagtgcgccgccctgctgagcgatttctttagaatgcggagacaggagatcaaggcccagaagaaggcacagagctccaccgactctggaggatctagcggaggatcctctggaagcgagacaccaggcacaagcgagtccgccacaccagagagctccggcggctcctccggaggatcctctgaggtggagttttcccacgagtactggatgagacatgccctgaccctggccaagagggcacgcgatgagagggaggtgcctgtgggagccgtgctggtgctgaacaatagagtgatcggcgagggctggaacagagccatcggcctgcacgacccaacagcccatgccgaaattatggccctgagacagggcggcctggtcatgcagaactacagactgattgacgccaccctgtacgtgacattcgagccttgcgtgatgtgcgccggcgccatgatccactctaggatcggccgcgtggtgtttggcgtgaggaacgcaaaaaccggcgccgcaggctccctgatggacgtgctgcactaccccggcatgaatcaccgcgtcgaaattaccgagggaatcctggcagatgaatgtgccgccctgctgtgctatttctttcggatgcctagacaggtgttcaatgctcagaagaaggcccagagctccaccgactccggaggatctagcggaggctcctctggctctgagacacctggcacaagcgagagcgcaacacctgaaagcagcgggggcagcagcggggggtcagacaagaagtacagcatcggcctggccatcggcaccaactctgtgggctgggccgtgatcaccgacgagtacaaggtgcccagcaagaaattcaaggtgctgggcaacaccgaccggcacagcatcaagaagaacctgatcggagccctgctgttcgacagcggcgaaacagccgaggccacccggctgaagagaaccgccagaagaagatacaccagacggaagaaccggatctgctatctgcaagagatcttcagcaacgagatggccaaggtggacgacagcttcttccacagactggaagagtccttcctggtggaagaggataagaagcacgagcggcaccccatcttcggcaacatcgtggacgaggtggcctaccacgagaagtaccccaccatctaccacctgagaaagaaactggtggacagcaccgacaaggccgacctgcggctgatctatctggccctggcccacatgatcaagttccggggccacttcctgatcgagggcgacctgaaccccgacaacagcgacgtggacaagctgttcatccagctggtgcagacctacaaccagctgttcgaggaaaaccccatcaacgccagcggcgtggacgccaaggccatcctgtctgccagactgagcaagagcagacggctggaaaatctgatcgcccagctgcccggcgagaagaagaatggcctgttcggaaacctgattgccctgagcctgggcctgacccccaacttcaagagcaacttcgacctggccgaggatgccaaactgcagctgagcaaggacacctacgacgacgacctggacaacctgctggcccagatcggcgaccagtacgccgacctgtttctggccgccaagaacctgtccgacgccatcctgctgagcgacatcctgagagtgaacaccgagatcaccaaggcccccctgagcgcctctatgatcaagagatacgacgagcaccaccaggacctgaccctgctgaaagctctcgtgcggcagcagctgcctgagaagtacaaagagattttcttcgaccagagcaagaacggctacgccggctacattgacggcggagccagccaggaagagttctacaagttcatcaagcccatcctggaaaagatggacggcaccgaggaactgctcgtgaagctgaacagagaggacctgctgcggaagcagcggaccttcgacaacggcagcatcccccaccagatccacctgggagagctgcacgccattctgcggcggcaggaagatttttacccattcctgaaggacaaccgggaaaagatcgagaagatcctgaccttccgcatcccctactacgtgggccctctggccaggggaaacagcagattcgcctggatgaccagaaagagcgaggaaaccatcaccccctggaacttcgaggaagtggtggacaagggcgcttccgcccagagcttcatcgagcggatgaccaacttcgataagaacctgcccaacgagaaggtgctgcccaagcacagcctgctgtacgagtacttcaccgtgtataacgagctgaccaaagtgaaatacgtgaccgagggaatgagaaagcccgccttcctgagcggcgagcagaaaaaggccatcgtggacctgctgttcaagaccaaccggaaagtgaccgtgaagcagctgaaagaggactacttcaagaaaatcgagtgcttcgactccgtggaaatctccggcgtggaagatcggttcaacgcctccctgggcacataccacgatctgctgaaaattatcaaggacaaggacttcctggacaatgaggaaaacgaggacattctggaagatatcgtgctgaccctgacactgtttgaggacagagagatgatcgaggaacggctgaaaacctatgcccacctgttcgacgacaaagtgatgaagcagctgaagcggcggagatacaccggctggggcaggctgagccggaagctgatcaacggcatccgggacaagcagtccggcaagacaatcctggatttcctgaagtccgacggcttcgccaacagaaacttcatgcagctgatccacgacgacagcctgacctttaaagaggacatccagaaagcccaggtgtccggccagggcgatagcctgcacgagcacattgccaatctggccggcagccccgccattaagaagggcatcctgcagacagtgaaggtggtggacgagctcgtgaaagtgatgggccggcacaagcccgagaacatcgtgatcgaaatggccagagagaaccagaccacccagaagggacagaagaacagccgcgagagaatgaagcggatcgaagagggcatcaaagagctgggcagccagatcctgaaagaacaccccgtggaaaacacccagctgcagaacgagaagctgtacctgtactacctgcagaatgggcgggatatgtacgtggaccaggaactggacatcaaccggctgtccgactacgatgtggaccatatcgtgcctcagagctttctgaaggacgactccatcgacaacaaggtgctgaccagaagcgacaagaaccggggcaagagcgacaacgtgccctccgaagaggtcgtgaagaagatgaagaactactggcggcagctgctgaacgccaagctgattacccagagaaagttcgacaatctgaccaaggccgagagaggcggcctgagcgaactggataaggccggcttcatcaagagacagctggtggaaacccggcagatcacaaagcacgtggcacagatcctggactcccggatgaacactaagtacgacgagaatgacaagctgatccgggaagtgaaagtgatcaccctgaagtccaagctggtgtccgatttccggaaggatttccagttttacaaagtgcgcgagatcaacaactaccaccacgcccacgacgcctacctgaacgccgtcgtgggaaccgccctgatcaaaaagtaccctaagctggaaagcgagttcgtgtacggcgactacaaggtgtacgacgtgcggaagatgatcgccaagagcgagcaggaaatcggcaaggctaccgccaagtacttcttctacagcaacatcatgaactttttcaagaccgagattaccctggccaacggcgagatccggaagcggcctctgatcgagacaaacggcgaaaccggggagatcgtgtgggataagggccgggattttgccaccgtgcggaaagtgctgagcatgccccaagtgaatatcgtgaaaaagaccgaggtgcagacaggcggcttcagcaaagagtctatcctgcccaagaggaacagcgataagctgatcgccagaaagaaggactgggaccctaagaagtacggcggcttcgacagccccaccgtggcctattctgtgctggtggtggccaaagtggaaaagggcaagtccaagaaactgaagagtgtgaaagagctgctggggatcaccatcatggaaagaagcagcttcgagaagaatcccatcgactttctggaagccaagggctacaaagaagtgaaaaaggacctgatcatcaagctgcctaagtactccctgttcgagctggaaaacggccggaagagaatgctggcctctgccggcgaactgcagaagggaaacgaactggccctgccctccaaatatgtgaacttcctgtacctggccagccactatgagaagctgaagggctcccccgaggataatgagcagaaacagctgtttgtggaacagcacaagcactacctggacgagatcatcgagcagatcagcgagttctccaagagagtgatcctggccgacgctaatctggacaaagtgctgtccgcctacaacaagcaccgggataagcccatcagagagcaggccgagaatatcatccacctgtttaccctgaccaatctgggagcccctgccgccttcaagtactttgacaccaccatcgaccggaagaggtacaccagcaccaaagaggtgctggacgccaccctgatccaccagagcatcaccggcctgtacgagacacggatcgacctgtctcagctgggaggtgactctggcggctcaaaaagaaccgccgacggcagcgaattcgagcccaagaagaagaggaaagtctaaccggtcatcatcaccatcaccattgagtttaaacccgctgatcagcctcgactgtgccttctagttgccagccatctgttgtttgcccctcccccgtgccttccttgaccctggaaggtgccactcccactgtcctttcctaataaaatgaggaaattgcatcgcattgtctgagtaggtgtcattctattctggggggtggggtggggcaggacagcaagggggaggattgggaagacaatagcaggcatgctggggatgcggtgggctctatggcttctgaggcggaaagaaccagctggggctcgataccgtcgacctctagctagagcttggcgtaatcatggtcatagctgtttcctgtgtgaaattgttatccgctcacaattccacacaacatacgagccggaagcataaagtgtaaagcctagggtgcctaatgagtgagctaactcacattaattgcgttgcgctcactgcccgctttccagtcgggaaacctgtcgtgccagctgcattaatgaatcggccaacgcgcggggagaggcggtttgcgtattgggcgctcttccgcttcctcgctcactgactcgctgcgctcggtcgttcggctgcggcgagcggtatcagctcactcaaaggcggtaatacggttatccacagaatcaggggataacgcaggaaagaacatgtgagcaaaaggccagcaaaaggccaggaaccgtaaaaaggccgcgttgctggcgtttttccataggctccgcccccctgacgagcatcacaaaaatcgacgctcaagtcagaggtggcgaaacccgacaggactataaagataccaggcgtttccccctggaagctccctcgtgcgctctcctgttccgaccctgccgcttaccggatacctgtccgcctttctcccttcgggaagcgtggcgctttctcatagctcacgctgtaggtatctcagttcggtgtaggtcgttcgctccaagctgggctgtgtgcacgaaccccccgttcagcccgaccgctgcgccttatccggtaactatcgtcttgagtccaacccggtaagacacgacttatcgccactggcagcagccactggtaacaggattagcagagcgaggtatgtaggcggtgctacagagttcttgaagtggtggcctaactacggctacactagaagaacagtatttggtatctgcgctctgctgaagccagttaccttcggaaaaagagttggtagctcttgatccggcaaacaaaccaccgctggtagcggtggtttttttgtttgcaagcagcagattacgcgcagaaaaaaaggatctcaagaagatcctttgatcttttctacggggtctgacactcagtggaacgaaaactcacgttaagggattttggtcatgagattatcaaaaaggatcttcacctagatccttttaaattaaaaatgaagttttaaatcaatctaaagtatatatgagtaaacttggtctgacagttaccaatgcttaatcagtgaggcacctatctcagcgatctgtctatttcgttcatccatagttgcctgactccccgtcgtgtagataactacgatacgggagggcttaccatctggccccagtgctgcaatgataccgcgagacccacgctcaccggctccagatttatcagcaataaaccagccagccggaagggccgagcgcagaagtggtcctgcaactttatccgcctccatccagtctattaattgttgccgggaagctagagtaagtagttcgccagttaatagtttgcgcaacgttgttgccattgctacaggcatcgtggtgtcacgctcgtcgtttggtatggcttcattcagctccggttcccaacgatcaaggcgagttacatgatcccccatgttgtgcaaaaaagcggttagctccttcggtcctccgatcgttgtcagaagtaagttggccgcagtgttatcactcatggttatggcagcactgcataattctcttactgtcatgccatccgtaagatgcttttctgtgactggtgagtactcaaccaagtcattctgagaatagtgtatgcggcgaccgagttgctcttgcccggcgtcaatacgggataataccgcgccacatagcagaactttaaaagtgctcatcattggaaaacgttcttcggggcgaaaactctcaaggatcttaccgctgttgagatccagttcgatgtaacccactcgtgcacccaactgatcttcagcatcttttactttcaccagcgtttctgggtgagcaaaaacaggaaggcaaaatgccgcaaaaaagggaataagggcgacacggaaatgttgaatactcatactcttcctttttcaatattattgaagcatttatcagggttattgtctcatgagcggatacatatttgaatgtatttagaaaaataaacaaataggggttccgcgcacatttccccgaaaagtgccacctgacgtcgacggatcgggagatcgatctcccgatcccctagggtcgactctcagtacaatctgctctgatgccgcatagttaagccagtatctgctccctgcttgtgtgttggaggtcgctgagtagtgcgcgagcaaaatttaagctacaacaaggcaaggcttgaccgacaattgcatgaagaatctgcttagggttaggcgttttgcgctgcttcgcgatgtacgggccagatatacgcgttgacattgattattgactagttattaatagtaatcaattacggggtcattagttcatagcccatatatggagttccgcgttacataacttacggtaaatggcccgcctggctgaccgcccaacgacccccgcccattgacgtcaataatgacgtatgttcccatagtaacgccaatagggactttccattgacgtcaatgggtggagtatttacggtaaactgcccacttggcagtacatcaagtgtatc

SEQ ID NO: 37 - protein, 1367 aa, Streptococcus pyogenes
MDKKYSIGLDIGTNSVGWAVITDDYKVPSKKFKVLGNTDRHSIKKNLIGALLFGSGETAEATRLKRTARRRYTRRKNRICYLQEIFSNEMAKVDDSFFHRLEESFLVEEDKKHERHPIFGNIVDEVAYHEKYPTIYHLRKKLADSTDKADLRLIYLALAHMIKFRGHFLIEGDLNPDNSDVDKLFIQLVQIYNQLFEENPINASRVDAKAILSARLSKSRRLENLIAQLPGEKRNGLFGNLIALSLGLTPNFKSNFDLAEDAKLQLSKDTYDDDLDNLLAQIGDQYADLFLAAKNLSDAILLSDILRVNSEITKAPLSASMIKRYDEHHQDLTLLKALVRQQLPEKYKEIFFDQSKNGYAGYIDGGASQEEFYKFIKPILEKMDGTEELLVKLNREDLLRKQRTFDNGSIPHQIHLGELHAILRRQEDFYPFLKDNREKIEKILTFRIPYYVGPLARGNSRFAWMTRKSEETITPWNFEEVVDKGASAQSFIERMTNFDKNLPNEKVLPKHSLLYEYFTVYNELTKVKYVTEGMRKPAFLSGEQKKAIVDLLFKTNRKVTVKQLKEDYFKKIECFDSVEISGVEDRFNASLGAYHDLLKIIKDKDFLDNEENEDILEDIVLTLTLFEDRGMIEERLKTYAHLFDDKVMKQLKRRRYTGWGRLSRKLINGIRDKQSGKTILDFLKSDGFANRNFMQLIHDDSLTFKEDIQKAQVSGQGHSLHEQIANLAGSPAIKKGILQTVKIVDELVKVMGHKPENIVIEMARENQTTQKGQKNSRERMKRIEEGIKELGSQILKEHPVENTQLQNEKLYLYYLQNGRDMYVDQELDINRLSDYDVDHIVPQSFIKDDSIDNKVLTRSDKNRGKSDNVPSEEVVKKMKNYWRQLLNAKLITQRKFDNLTKAERGGLSELDKAGFIKRQLVETRQITKHVAQILDSRMNTKYDENDKLIREVKVITLKSKLVSDFRKDFQFYKVREINNYHHAHDAYLNAVVGTALIKKYPKLESEFVYGDYKVYDVRKMIAKSEQEIGKATAKYFFYSNIMNFFKTEITLANGEIRKRPLIETNGETGEIVWDKGRDFATVRKVLSMPQVNIVKKTEVQTGGFSKESILPKRNSDKLIARKKDWDPKKYGGFDSPTVAYSVLVVAKVEKGKSKKLKSVKELLGITIMERSSFEKNPIDFLEAKGYKEVKKDLIIKLPKYSLFELENGRKRMLASAGELQKGNELALPSKYVNFLYLASHYEKLKGSPEDNEQKQLFVEQHKHYLDEIIEQISEFSKRVILADANLDKVLSAYNKHRDKPIREQAENIIHLFTLTNLGAPAAFKYFDTTIDRKRYTSTKEVLDATLIHQSITGLYETRIDLSQLGGD

SEQ ID NO: 38 - DNA, 4104 bp, Streptococcus pyogenes
atggataagaaatactcaataggcttagatatcggcacaaatagcgtcggatgggcggtgatcactgatgattataaggttccgtctaaaaagttcaaggttctgggaaatacagaccgccacagtatcaaaaaaaatcttataggggctcttttatttggcagtggagagacagcggaagcgactcgtctcaaacggacagctcgtagaaggtatacacgtcggaagaatcgtatttgttatctacaggagattttttcaaatgagatggcgaaagtagatgatagtttctttcatcgacttgaagagtcttttttggtggaagaagacaagaagcatgaacgtcatcctatttttggaaatatagtagatgaagttgcttatcatgagaaatatccaactatctatcatctgcgaaaaaaattggcagattctactgataaagcggatttgcgcttaatctatttggccttagcgcatatgattaagtttcgtggtcattttttgattgagggagatttaaatcctgataatagtgatgtggacaaactatttatccagttggtacaaatctacaatcaattatttgaagaaaaccctattaacgcaagtagagtagatgctaaagcgattctttctgcacgattgagtaaatcaagacgattagaaaatctcattgctcagctccccggtgagaagagaaatggcttgtttgggaatctcattgctttgtcattgggattgacccctaattttaaatcaaattttgatttggcagaagatgctaaattacagctttcaaaagatacttacgatgatgatttagataatttattggcgcaaattggagatcaatatgctgatttgtttttggcagctaagaatttatcagatgctattttactttcagatatcctaagagtaaatagtgaaataactaaggctcccctatcagcttcaatgattaagcgctacgatgaacatcatcaagacttgactcttttaaaagctttagttcgacaacaacttccagaaaagtataaagaaatcttttttgatcaatcaaaaaacggatatgcaggttatattgatgggggagctagccaagaagaattttataaatttatcaaaccaattttagaaaaaatggatggtactgaggaattattggtgaaactaaatcgtgaagatttgctgcgcaagcaacggacctttgacaacggctctattccccatcaaattcacttgggtgagctgcatgctattttgagaagacaagaagacttttatccatttttaaaagacaatcgtgagaagattgaaaaaatcttgacttttcgaattccttattatgttggtccattggcgcgtggcaatagtcgttttgcatggatgactcggaagtctgaagaaacaattaccccatggaattttgaagaagttgtcgataaaggtgcttcagctcaatcatttattgaacgcatgacaaactttgataaaaatcttccaaatgaaaaagtactaccaaaacatagtttgctttatgagtattttacggtttataacgaattgacaaaggtcaaatatgttactgagggaatgcgaaaaccagcatttctttcaggtgaacagaagaaagccattgttgatttactcttcaaaacaaatcgaaaagtaaccgttaagcaattaaaagaagattatttcaaaaaaatagaatgttttgatagtgttgaaatttcaggagttgaagatagatttaatgcttcattaggcgcctaccatgatttgctaaaaattattaaagataaagattttttggataatgaagaaaatgaagatatcttagaggatattgttttaacattgaccttatttgaagatagggggatgattgaggaaagacttaaaacatatgctcacctctttgatgataaggtgatgaaacagcttaaacgtcgccgttatactggttggggacgtttgtctcgaaaattgattaatggtattagggataagcaatctggcaaaacaatattagattttttgaaatcagatggttttgccaatcgcaattttatgcagctgatccatgatgatagtttgacatttaaagaagatattcaaaaagcacaggtgtctggacaaggccatagtttacatgaacagattgctaacttagctggcagtcctgctattaaaaaaggtattttacagactgtaaaaattgttgatgaactggtcaaagtaatggggcataagccagaaaatatcgttattgaaatggcacgtgaaaatcagacaactcaaaagggccagaaaaattcgcgagagcgtatgaaacgaatcgaagaaggtatcaaagaattaggaagtcagattcttaaagagcatcctgttgaaaatactcaattgcaaaatgaaaagctctatctctattatctacaaaatggaagagacatgtatgtggaccaagaattagatattaatcgtttaagtgattatgatgtcgatcacattgttccacaaagtttcattaaagacgattcaatagacaataaggtactaacgcgttctgataaaaatcgtggtaaatcggataacgttccaagtgaagaagtagtcaaaaagatgaaaaactattggagacaacttctaaacgccaagttaatcactcaacgtaagtttgataatttaacgaaagctgaacgtggaggtttgagtgaacttgataaagctggttttatcaaacgccaattggttgaaactcgccaaatcactaagcatgtggcacaaattttggatagtcgcatgaatactaaatacgatgaaaatgataaacttattcgagaggttaaagtgattaccttaaaatctaaattagtttctgacttccgaaaagatttccaattctataaagtacgtgagattaacaattaccatcatgcccatgatgcgtatctaaatgccgtcgttggaactgctttgattaagaaatatccaaaacttgaatcggagtttgtctatggtgattataaagtttatgatgttcgtaaaatgattgctaagtctgagcaagaaataggcaaagcaaccgcaaaatatttcttttactctaatatcatgaacttcttcaaaacagaaattacacttgcaaatggagagattcgcaaacgccctctaatcgaaactaatggggaaactggagaaattgtctgggataaagggcgagattttgccacagtgcgcaaagtattgtccatgccccaagtcaatattgtcaagaaaacagaagtacagacaggcggattctccaaggagtcaattttaccaaaaagaaattcggacaagcttattgctcgtaaaaaagactgggatccaaaaaaatatggtggttttgatagtccaacggtagcttattcagtcctagtggttgctaaggtggaaaaagggaaatcgaagaagttaaaatccgttaaagagttactagggatcacaattatggaaagaagttcctttgaaaaaaatccgattgactttttagaagctaaaggatataaggaagttaaaaaagacttaatcattaaactacctaaatatagtctttttgagttagaaaacggtcgtaaacggatgctggctagtgccggagaattacaaaaaggaaatgagctggctctgccaagcaaatatgtgaattttttatatttagctagtcattatgaaaagttgaagggtagtccagaagataacgaacaaaaacaattgtttgtggagcagcataagcattatttagatgagattattgagcaaatcagtgaattttctaagcgtgttattttagcagatgccaatttagataaagttcttagtgcatataacaaacatagagacaaaccaatacgtgaacaagcagaaaatattattcatttatttacgttgacgaatcttggagctcccgctgcttttaaatattttgatacaacaattgatcgtaaacgatatacgtctacaaaagaagttttagatgccactcttatccatcaatccatcactggtctttatgaaacacgcattgatttgagtcagctaggaggtgactga

SEQ ID NO: 39 - DNA, 4212 bp, Streptococcus pyogenes
atggataaaaagtattctattggtttagacatcggcactaattccgttggatgggctgtcataaccgatgaatacaaagtaccttcaaagaaatttaaggtgttggggaacacagaccgtcattcgattaaaaagaatcttatcggtgccctcctattcgatagtggcgaaacggcagaggcgactcgcctgaaacgaaccgctcggagaaggtatacacgtcgcaagaaccgaatatgttacttacaagaaatttttagcaatgagatggccaaagttgacgattctttctttcaccgtttggaagagtccttccttgtcgaagaggacaagaaacatgaacggcaccccatctttggaaacatagtagatgaggtggcatatcatgaaaagtacccaacgatttatcacctcagaaaaaagctagttgactcaactgataaagcggacctgaggttaatctacttggctcttgcccatatgataaagttccgtgggcactttctcattgagggtgatctaaatccggacaactcggatgtcgacaaactgttcatccagttagtacaaacctataatcagttgtttgaagagaaccctataaatgcaagtggcgtggatgcgaaggctattcttagcgcccgcctctctaaatcccgacggctagaaaacctgatcgcacaattacccggagagaagaaaaatgggttgttcggtaaccttatagcgctctcactaggcctgacaccaaattttaagtcgaacttcgacttagctgaagatgccaaattgcagcttagtaaggacacgtacgatgacgatctcgacaatctactggcacaaattggagatcagtatgcggacttatttttggctgccaaaaaccttagcgatgcaatcctcctatctgacatactgagagttaatactgagattaccaaggcgccgttatccgcttcaatgatcaaaaggtacgatgaacatcaccaagacttgacacttctcaaggccctagtccgtcagcaactgcctgagaaatataaggaaatattctttgatcagtcgaaaaacgggtacgcaggttatattgacggcggagcgagtcaagaggaattctacaagtttatcaaacccatattagagaagatggatgggacggaagagttgcttgtaaaactcaatcgcgaagatctactgcgaaagcagcggactttcgacaacggtagcattccacatcaaatccacttaggcgaattgcatgctatacttagaaggcaggaggatttttatccgttcctcaaagacaatcgtgaaaagattgagaaaatcctaacctttcgcataccttactatgtgggacccctggcccgagggaactctcggttcgcatggatgacaagaaagtccgaagaaacgattactccatggaattttgaggaagttgtcgataaaggtgcgtcagctcaatcgttcatcgagaggatgaccaactttgacaagaatttaccgaacgaaaaagtattgcctaagcacagtttactttacgagtatttcacagtgtacaatgaactcacgaaagttaagtatgtcactgagggcatgcgtaaacccgcctttctaagcggagaacagaagaaagcaatagtagatctgttattcaagaccaaccgcaaagtgacagttaagcaattgaaagaggactactttaagaaaattgaatgcttcgattctgtcgagatctccggggtagaagatcgatttaatgcgtcacttggtacgtatcatgacctcctaaagataattaaagataaggacttcctggataacgaagagaatgaagatatcttagaagatatagtgttgactcttaccctctttgaagatcgggaaatgattgaggaaagactaaaaacatacgctcacctgttcgacgataaggttatgaaacagttaaagaggcgtcgctatacgggctggggacgattgtcgcggaaacttatcaacgggataagagacaagcaaagtggtaaaactattctcgattttctaaagagcgacggcttcgccaataggaactttatgcagctgatccatgatgactctttaaccttcaaagaggatatacaaaaggcacaggtttccggacaaggggactcattgcacgaacatattgcgaatcttgctggttcgccagccatcaaaaagggcatactccagacagtcaaagtagtggatgagctagttaaggtcatgggacgtcacaaaccggaaaacattgtaatcgagatggcacgcgaaaatcaaacgactcagaaggggcaaaaaaacagtcgagagcggatgaagagaatagaagagggtattaaagaactgggcagccagatcttaaaggagcatcctgtggaaaatacccaattgcagaacgagaaactttacctctattacctacaaaatggaagggacatgtatgttgatcaggaactggacataaaccgtttatctgattacgacgtcgatcacattgtaccccaatcctttttgaaggacgattcaatcgacaataaagtgcttacacgctcggataagaaccgagggaaaagtgacaatgttccaagcgaggaagtcgtaaagaaaatgaagaactattggcggcagctcctaaatgcgaaactgataacgcaaagaaagttcgataacttaactaaagctgagaggggtggcttgtctgaacttgacaaggccggatttattaaacgtcagctcgtggaaacccgccaaatcacaaagcatgttgcacagatactagattcccgaatgaatacgaaatacgacgagaacgataagctgattcgggaagtcaaagtaatcactttaaagtcaaaattggtgtcggacttcagaaaggattttcaattctataaagttagggagataaataactaccaccatgcgcacgacgcttatcttaatgccgtcgtagggaccgcactcattaagaaatacccgaagctagaaagtgagtttgtgtatggtgattacaaagtttatgacgtccgtaagatgatcgcgaaaagcgaacaggagataggcaaggctacagccaaatacttcttttattctaacattatgaatttctttaagacggaaatcactctggcaaacggagagatacgcaaacgacctttaattgaaaccaatggggagacaggtgaaatcgtatgggataagggccgggacttcgcgacggtgagaaaagttttgtccatgccccaagtcaacatagtaaagaaaactgaggtgcagaccggagggttttcaaaggaatcgattcttccaaaaaggaatagtgataagctcatcgctcgtaaaaaggactgggacccgaaaaagtacggtggcttcgatagccctacagttgcctattctgtcctagtagtggcaaaagttgagaagggaaaatccaagaaactgaagtcagtcaaagaattattggggataacgattatggagcgctcgtcttttgaaaagaaccccatcgacttccttgaggcgaaaggttacaaggaagtaaaaaaggatctcataattaaactaccaaagtatagtctgtttgagttagaaaatggccgaaaacggatgttggctagcgccggagagcttcaaaaggggaacgaactcgcactaccgtctaaatacgtgaatttcctgtatttagcgtcccattacgagaagttgaaaggttcacctgaagataacgaacagaagcaactttttgttgagcagcacaaacattatctcgacgaaatcatagagcaaatttcggaattcagtaagagagtcatcctagctgatgccaatctggacaaagtattaagcgcatacaacaagcacagggataaacccatacgtgagcaggcggaaaatattatccatttgtttactcttaccaacctcggcgctccagccgcattcaagtattttgacacaacgatagatcgcaaacgatacacttctaccaaggaggtgctagacgcgacactgattcaccaatccatcacgggattatatgaaactcggatagatttgtcacagcttgggggtgacggatcccccaagaagaagaggaaagtctcgagcgactacaaagaccatgacggtgattataaagatcatgacatcgattacaaggatgacgatgacaaggctgcagga

SEQ ID NO: 40 - DNA, 4107 bp, Streptococcus pyogenes
atggataagaaatactcaataggcttagatatcggcacaaatagcgtcggatgggcggtgatcactgatgaatataaggttccgtctaaaaagttcaaggttctgggaaatacagaccgccacagtatcaaaaaaaatcttataggggctcttttatttgacagtggagagacagcggaagcgactcgtctcaaacggacagctcgtagaaggtatacacgtcggaagaatcgtatttgttatctacaggagattttttcaaatgagatggcgaaagtagatgatagtttctttcatcgacttgaagagtcttttttggtggaagaagacaagaagcatgaacgtcatcctatttttggaaatatagtagatgaagttgcttatcatgagaaatatccaactatctatcatctgcgaaaaaaattggtagattctactgataaagcggatttgcgcttaatctatttggccttagcgcatatgattaagtttcgtggtcattttttgattgagggagatttaaatcctgataatagtgatgtggacaaactatttatccagttggtacaaacctacaatcaattatttgaagaaaaccctattaacgcaagtggagtagatgctaaagcgattctttctgcacgattgagtaaatcaagacgattagaaaatctcattgctcagctccccggtgagaagaaaaatggcttatttgggaatctcattgctttgtcattgggtttgacccctaattttaaatcaaattttgatttggcagaagatgctaaattacagctttcaaaagatacttacgatgatgatttagataatttattggcgcaaattggagatcaatatgctgatttgtttttggcagctaagaatttatcagatgctattttactttcagatatcctaagagtaaatactgaaataactaaggctcccctatcagcttcaatgattaaacgctacgatgaacatcatcaagacttgactcttttaaaagctttagttcgacaacaacttccagaaaagtataaagaaatcttttttgatcaatcaaaaaacggatatgcaggttatattgatgggggagctagccaagaagaattttataaatttatcaaaccaattttagaaaaaatggatggtactgaggaattattggtgaaactaaatcgtgaagatttgctgcgcaagcaacggacctttgacaacggctctattccccatcaaattcacttgggtgagctgcatgctattttgagaagacaagaagacttttatccatttttaaaagacaatcgtgagaagattgaaaaaatcttgacttttcgaattccttattatgttggtccattggcgcgtggcaatagtcgttttgcatggatgactcggaagtctgaagaaacaattaccccatggaattttgaagaagttgtcgataaaggtgcttcagctcaatcatttattgaacgcatgacaaactttgataaaaatcttccaaatgaaaaagtactaccaaaacatagtttgctttatgagtattttacggtttataacgaattgacaaaggtcaaatatgttactgaaggaatgcgaaaaccagcatttctttcaggtgaacagaagaaagccattgttgatttactcttcaaaacaaatcgaaaagtaaccgttaagcaattaaaagaagattatttcaaaaaaatagaatgttttgatagtgttgaaatttcaggagttgaagatagatttaatgcttcattaggtacctaccatgatttgctaaaaattattaaagataaagattttttggataatgaagaaaatgaagatatcttagaggatattgttttaacattgaccttatttgaagatagggagatgattgaggaaagacttaaaacatatgctcacctctttgatgataaggtgatgaaacagcttaaacgtcgccgttatactggttggggacgtttgtctcgaaaattgattaatggtattagggataagcaatctggcaaaacaatattagattttttgaaatcagatggttttgccaatcgcaattttatgcagctgatccatgatgatagtttgacatttaaagaagacattcaaaaagcacaagtgtctggacaaggcgatagtttacatgaacatattgcaaatttagctggtagccctgctattaaaaaaggtattttacagactgtaaaagttgttgatgaattggtcaaagtaatggggcggcataagccagaaaatatcgttattgaaatggcacgtgaaaatcagacaactcaaaagggccagaaaaattcgcgagagcgtatgaaacgaatcgaagaaggtatcaaagaattaggaagtcagattcttaaagagcatcctgttgaaaatactcaattgcaaaatgaaaagctctatctctattatctccaaaatggaagagacatgtatgtggaccaagaattagatattaatcgtttaagtgattatgatgtcgatcacattgttccacaaagtttccttaaagacgattcaatagacaataaggtcttaacgcgttctgataaaaatcgtggtaaatcggataacgttccaagtgaagaagtagtcaaaaagatgaaaaactattggagacaacttctaaacgccaagttaatcactcaacgtaagtttgataatttaacgaaagctgaacgtggaggtttgagtgaacttgataaagctggttttatcaaacgccaattggttgaaactcgccaaatcactaagcatgtggcacaaattttggatagtcgcatgaatactaaatacgatgaaaatgataaacttattcgagaggttaaagtgattaccttaaaatctaaattagtttctgacttccgaaaagatttccaattctataaagtacgtgagattaacaattaccatcatgcccatgatgcgtatctaaatgccgtcgttggaactgctttgattaagaaatatccaaaacttgaatcggagtttgtctatggtgattataaagtttatgatgttcgtaaaatgattgctaagtctgagcaagaaataggcaaagcaaccgcaaaatatttcttttactctaatatcatgaacttcttcaaaacagaaattacacttgcaaatggagagattcgcaaacgccctctaatcgaaactaatggggaaactggagaaattgtctgggataaagggcgagattttgccacagtgcgcaaagtattgtccatgccccaagtcaatattgtcaagaaaacagaagtacagacaggcggattctccaaggagtcaattttaccaaaaagaaattcggacaagcttattgctcgtaaaaaagactgggatccaaaaaaatatggtggttttgatagtccaacggtagcttattcagtcctagtggttgctaaggtggaaaaagggaaatcgaagaagttaaaatccgttaaagagttactagggatcacaattatggaaagaagttcctttgaaaaaaatccgattgactttttagaagctaaaggatataaggaagttaaaaaagacttaatcattaaactacctaaatatagtctttttgagttagaaaacggtcgtaaacggatgctggctagtgccggagaattacaaaaaggaaatgagctggctctgccaagcaaatatgtgaattttttatatttagctagtcattatgaaaagttgaagggtagtccagaagataacgaacaaaaacaattgtttgtggagcagcataagcattatttagatgagattattgagcaaatcagtgaattttctaagcgtgttattttagcagatgccaatttagataaagttcttagtgcatataacaaacatagagacaaaccaatacgtgaacaagcagaaaatattattcatttatttacgttgacgaatcttggagctcccgctgcttttaaatattttgatacaacaattgatcgtaaacgatatacgtctacaaaagaagttttagatgccactcttatccatcaatccatcactggtctttatgaaacacgcattgatttgagtcagctaggaggtgactga

SEQ ID NO: 41 - protein, 1368 aa, Artificial Sequence
  Description of Artificial Sequence: Synthetic polypeptide
MDKKYSIGLAIGTNSVGWAVITDEYKVPSKKFKVLGNTDRHSIKKNLIGALLFDSGETAEATRLKRTARRRYTRRKNRICYLQEIFSNEMAKVDDSFFHRLEESFLVEEDKKHERHPIFGNIVDEVAYHEKYPTIYHLRKKLVDSTDKADLRLIYLALAHMIKFRGHFLIEGDLNPDNSDVDKLFIQLVQTYNQLFEENPINASGVDAKAILSARLSKSRRLENLIAQLPGEKKNGLFGNLIALSLGLTPNFKSNFDLAEDAKLQLSKDTYDDDLDNLLAQIGDQYADLFLAAKNLSDAILLSDILRVNTEITKAPLSASMIKRYDEHHQDLTLLKALVRQQLPEKYKEIFFDQSKNGYAGYIDGGASQEEFYKFIKPILEKMDGTEELLVKLNREDLLRKQRTFDNGSIPHQIHLGELHAILRRQEDFYPFLKDNREKIEKILTFRIPYYVGPLARGNSRFAWMTRKSEETITPWNFEEVVDKGASAQSFIERMTNFDKNLPNEKVLPKHSLLYEYFTVYNELTKVKYVTEGMRKPAFLSGEQKKAIVDLLFKTNRKVTVKQLKEDYFKKIECFDSVEISGVEDRFNASLGTYHDLLKIIKDKDFLDNEENEDILEDIVLTLTLFEDREMIEERLKTYAHLFDDKVMKQLKRRRYTGWGRLSRKLINGIRDKQSGKTILDFLKSDGFANRNFMQLIHDDSLTFKEDIQKAQVSGQGDSLHEHIANLAGSPAIKKGILQTVKVVDELVKVMGRHKPENIVIEMARENQTTQKGQKNSRERMKRIEEGIKELGSQILKEHPVENTQLQNEKLYLYYLQNGRDMYVDQELDINRLSDYDVDAIVPQSFLKDDSIDNKVLTRSDKNRGKSDNVPSEEVVKKMKNYWRQLLNAKLITQRKFDNLTKAERGGLSELDKAGFIKRQLVETRQITKHVAQILDSRMNTKYDENDKLIREVKVITLKSKLVSDFRKDFQFYKVREINNYHHAHDAYLNAVVGTALIKKYPKLESEFVYGDYKVYDVRKMIAKSEQEIGKATAKYFFYSNIMNFFKTEITLANGEIRKRPLIETNGETGEIVWDKGRDFATVRKVLSMPQVNIVKKTEVQTGGFSKESILPKRNSDKLIARKKDWDPKKYGGFDSPTVAYSVLVVAKVEKGKSKKLKSVKELLGITIMERSSFEKNPIDFLEAKGYKEVKKDLIIKLPKYSLFELENGRKRMLASAGELQKGNELALPSKYVNFLYLASHYEKLKGSPEDNEQKQLFVEQHKHYLDEIIEQISEFSKRVILADANLDKVLSAYNKHRDKPIREQAENIIHLFTLTNLGAPAAFKYFDTTIDRKRYTSTKEVLDATLIHQSITGLYETRIDLSQLGGD

SEQ ID NO: 42 - protein, 1367 aa, Artificial Sequence
  Description of Artificial Sequence: Synthetic polypeptide
DKKYSIGLAIGTNSVGWAVITDEYKVPSKKFKVLGNTDRHSIKKNLIGALLFDSGETAEATRLKRTARRRYTRRKNRICYLQEIFSNEMAKVDDSFFHRLEESFLVEEDKKHERHPIFGNIVDEVAYHEKYPTIYHLRKKLVDSTDKADLRLIYLALAHMIKFRGHFLIEGDLNPDNSDVDKLFIQLVQTYNQLFEENPINASGVDAKAILSARLSKSRRLENLIAQLPGEKKNGLFGNLIALSLGLTPNFKSNFDLAEDAKLQLSKDTYDDDLDNLLAQIGDQYADLFLAAKNLSDAILLSDILRVNTEITKAPLSASMIKRYDEHHQDLTLLKALVRQQLPEKYKEIFFDQSKNGYAGYIDGGASQEEFYKFIKPILEKMDGTEELLVKLNREDLLRKQRTFDNGSIPHQIHLGELHAILRRQEDFYPFLKDNREKIEKILTFRIPYYVGPLARGNSRFAWMTRKSEETITPWNFEEVVDKGASAQSFIERMTNFDKNLPNEKVLPKHSLLYEYFTVYNELTKVKYVTEGMRKPAFLSGEQKKAIVDLLFKTNRKVTVKQLKEDYFKKIECFDSVEISGVEDRFNASLGTYHDLLKIIKDKDFLDNEENEDILEDIVLTLTLFEDREMIEERLKTYAHLFDDKVMKQLKRRRYTGWGRLSRKLINGIRDKQSGKTILDFLKSDGFANRNFMQLIHDDSLTFKEDIQKAQVSGQGDSLHEHIANLAGSPAIKKGILQTVKVVDELVKVMGRHKPENIVIEMARENQTTQKGQKNSRERMKRIEEGIKELGSQILKEHPVENTQLQNEKLYLYYLQNGRDMYVDQELDINRLSDYDVDAIVPQSFLKDDSIDNKVLTRSDKNRGKSDNVPSEEVVKKMKNYWRQLLNAKLITQRKFDNLTKAERGGLSELDKAGFIKRQLVETRQITKHVAQILDSRMNTKYDENDKLIREVKVITLKSKLVSDFRKDFQFYKVREINNYHHAHDAYLNAVVGTALIKKYPKLESEFVYGDYKVYDVRKMIAKSEQEIGKATAKYFFYSNIMNFFKTEITLANGEIRKRPLIETNGETGEIVWDKGRDFATVRKVLSMPQVNIVKKTEVQTGGFSKESILPKRNSDKLIARKKDWDPKKYGGFDSPTVAYSVLVVAKVEKGKSKKLKSVKELLGITIMERSSFEKNPIDFLEAKGYKEVKKDLIIKLPKYSLFELENGRKRMLASAGELQKGNELALPSKYVNFLYLASHYEKLKGSPEDNEQKQLFVEQHKHYLDEIIEQISEFSKRVILADANLDKVLSAYNKHRDKPIREQAENIIHLFTLTNLGAPAAFKYFDTTIDRKRYTSTKEVLDATLIHQSITGLYETRIDLSQLGGD

SEQ ID NO: 43 - protein, 1367 aa, Artificial Sequence
  Description of Artificial Sequence: Synthetic polypeptide
DKKYSIGLAIGTNSVGWAVITDEYKVPSKKFKVLGNTDRHSIKKNLIGALLFDSGETAEATRLKRTARRRYTRRKNRICYLQEIFSNEMAKVDDSFFHRLEESFLVEEDKKHERHPIFGNIVDEVAYHEKYPTIYHLRKKLVDSTDKADLRLIYLALAHMIKFRGHFLIEGDLNPDNSDVDKLFIQLVQTYNQLFEENPINASGVDAKAILSARLSKSRRLENLIAQLPGEKKNGLFGNLIALSLGLTPNFKSNFDLAEDAKLQLSKDTYDDDLDNLLAQIGDQYADLFLAAKNLSDAILLSDILRVNTEITKAPLSASMIKRYDEHHQDLTLLKALVRQQLPEKYKEIFFDQSKNGYAGYIDGGASQEEFYKFIKPILEKMDGTEELLVKLNREDLLRKQRTFDNGSIPHQIHLGELHAILRRQEDFYPFLKDNREKIEKILTFRIPYYVGPLARGNSRFAWMTRKSEETITPWNFEEVVDKGASAQSFIERMTNFDKNLPNEKVLPKHSLLYEYFTVYNELTKVKYVTEGMRKPAFLSGEQKKAIVDLLFKTNRKVTVKQLKEDYFKKIECFDSVEISGVEDRFNASLGTYHDLLKIIKDKDFLDNEENEDILEDIVLTLTLFEDREMIEERLKTYAHLFDDKVMKQLKRRRYTGWGRLSRKLINGIRDKQSGKTILDFLKSDGFANRNFMQLIHDDSLTFKEDIQKAQVSGQGDSLHEHIANLAGSPAIKKGILQTVKVVDELVKVMGRHKPENIVIEMARENQTTQKGQKNSRERMKRIEEGIKELGSQILKEHPVENTQLQNEKLYLYYLQNGRDMYVDQELDINRLSDYDVDHIVPQSFLKDDSIDNKVLTRSDKNRGKSDNVPSEEVVKKMKNYWRQLLNAKLITQRKFDNLTKAERGGLSELDKAGFIKRQLVETRQITKHVAQILDSRMNTKYDENDKLIREVKVITLKSKLVSDFRKDFQFYKVREINNYHHAHDAYLNAVVGTALIKKYPKLESEFVYGDYKVYDVRKMIAKSEQEIGKATAKYFFYSNIMNFFKTEITLANGEIRKRPLIETNGETGEIVWDKGRDFATVRKVLSMPQVNIVKKTEVQTGGFSKESILPKRNSDKLIARKKDWDPKKYGGFDSPTVAYSVLVVAKVEKGKSKKLKSVKELLGITIMERSSFEKNPIDFLEAKGYKEVKKDLIIKLPKYSLFELENGRKRMLASAGELQKGNELALPSKYVNFLYLASHYEKLKGSPEDNEQKQLFVEQHKHYLDEIIEQISEFSKRVILADANLDKVLSAYNKHRDKPIREQAENIIHLFTLTNLGAPAAFKYFDTTIDRKRYTSTKEVLDATLIHQSITGLYETRIDLSQLGGD

SEQ ID NO: 44 - protein, 1367 aa, Streptococcus pyogenes
DKKYSIGLDIGTNSVGWAVITDEYKVPSKKFKVLGNTDRHSIKKNLIGALLFDSGETAEATRLKRTARRRYTRRKNRICYLQEIFSNEMAKVDDSFFHRLEESFLVEEDKKHERHPIFGNIVDEVAYHEKYPTIYHLRKKLVDSTDKADLRLIYLALAHMIKFRGHFLIEGDLNPDNSDVDKLFIQLVQTYNQLFEENPINASGVDAKAILSARLSKSRRLENLIAQLPGEKKNGLFGNLIALSLGLTPNFKSNFDLAEDAKLQLSKDTYDDDLDNLLAQIGDQYADLFLAAKNLSDAILLSDILRVNTEITKAPLSASMIKRYDEHHQDLTLLKALVRQQLPEKYKEIFFDQSKNGYAGYIDGGASQEEFYKFIKPILEKMDGTEELLVKLNREDLLRKQRTFDNGSIPHQIHLGELHAILRRQEDFYPFLKDNREKIEKILTFRIPYYVGPLARGNSRFAWMTRKSEETITPWNFEEVVDKGASAQSFIERMTNFDKNLPNEKVLPKHSLLYEYFTVYNELTKVKYVTEGMRKPAFLSGEQKKAIVDLLFKTNRKVTVKQLKEDYFKKIECFDSVEISGVEDRFNASLGTYHDLLKIIKDKDFLDNEENEDILEDIVLTLTLFEDREMIEERLKTYAHLFDDKVMKQLKRRRYTGWGRLSRKLINGIRDKQSGKTILDFLKSDGFANRNFMQLIHDDSLTFKEDIQKAQVSGQGDSLHEHIANLAGSPAIKKGILQTVKVVDELVKVMGRHKPENIVIEMARENQTTQKGQKNSRERMKRIEEGIKELGSQILKEHPVENTQLQNEKLYLYYLQNGRDMYVDQELDINRLSDYDVDHIVPQSFLKDDSIDNKVLTRSDKNRGKSDNVPSEEVVKKMKNYWRQLLNAKLITQRKFDNLTKAERGGLSELDKAGFIKRQLVETRQITKHVAQILDSRMNTKYDENDKLIREVKVITLKSKLVSDFRKDFQFYKVREINNYHHAHDAYLNAVVGTALIKKYPKLESEFVYGDYKVYDVRKMIAKSEQEIGKATAKYFFYSNIMNFFKTEITLANGEIRKRPLIETNGETGEIVWDKGRDFATVRKVLSMPQVNIVKKTEVQTGGFSKESILPKRNSDKLIARKKDWDPKKYGGFDSPTVAYSVLVVAKVEKGKSKKLKSVKELLGITIMERSSFEKNPIDFLEAKGYKEVKKDLIIKLPKYSLFELENGRKRMLASAGELQKGNELALPSKYVNFLYLASHYEKLKGSPEDNEQKQLFVEQHKHYLDEIIEQISEFSKRVILADANLDKVLSAYNKHRDKPIREQAENIIHLFTLTNLGAPAAFKYFDTTIDRKRYTSTKEVLDATLIHQSITGLYETRIDLSQLGGD

SEQ ID NO: 45 - protein, 1129 aa, Alicyclobacillus acidoterrestris
MAVKSIKVKLRLDDMPEIRAGLWKLHKEVNAGVRYYTEWLSLLRQENLYRRSPNGDGEQECDKTAEECKAELLERLRARQVENGHRGPAGSDDELLQLARQLYELLVPQAIGAKGDAQQIARKFLSPLADKDAVGGLGIAKAGNKPRWVRMREAGEPGWEEEKEKAETRKSADRTADVLRALADFGLKPLMRVYTDSEMSSVEWKPLRKGQAVRTWDRDMFQQAIERMMSWESWNQRVGQEYAKLVEQKNRFEQKNFVGQEHLVHLVNQLQQDMKEASPGLESKEQTAHYVTGRALRGSDKVFEKWGKLAPDAPFDLYDAEIKNVQRRNTRRFGSHDLFAKLAEPEYQALWREDASFLTRYAVYNSILRKLNHAKMFATFTLPDATAHPIWTRFDKLGGNLHQYTFLFNEFGERRHAIRFHKLLKVENGVAREVDDVTVPISMSEQLDNLLPRDPNEPIALYFRDYGAEQHFTGEFGGAKIQCRRDQLAHMHRRRGARDVYLNVSVRVQSQSEARGERRPPYAAVFRLVGDNHRAFVHFDKLSDYLAEHPDDGKLGSEGLLSGLRVMSVDLGLRTSASISVFRVARKDELKPNSKGRVPFFFPIKGNDNLVAVHERSQLLKLPGETESKDLRAIREERQRTLRQLRTQLAYLRLLVRCGSEDVGRRERSWAKLIEQPVDAANHMTPDWREAFENELQKLKSLHGICSDKEWMDAVYESVRRVWRHMGKQVRDWRKDVRSGERPKIRGYAKDVVGGNSIEQIEYLERQYKFLKSWSFFGKVSGQVIRAEKGSRFAITLREHIDHAKEDRLKKLADRIIMEALGYVYALDERGKGKWVAKYPPCQLILLEELSEYQFNNDRPPSENNQLMQWSHRGVFQELINQAQVHDLLVGTMYAAFSSRFDARTGAPGIRCRRVPARCTQEHNPEPFPWWLNKFVVEHTLDACPLRADDLIPTGEGEIFVSPFSAEEGDFHQIHADLNAAQNLQQRLWSDFDISQIRLRCDWGEVDGELVLIPRLTGKRTADSYSNKVFYTNTGVTYYERERGKKRRKVFAQEKLSEEEAELLVEADEAREKSVVLMRDPSGIINRGNWTRQKEFWSMVNQRIEGYLVKQIRSRVPLQDSACENTGDI

SEQ ID NO: 46 - protein, 345 aa, Sulfolobus islandicus
MEVPLYNIFGDNYIIQVATEAENSTIYNNKVEIDDEELRNVLNLAYKIAKNNEDAAAERRGKAKKKKGEEGETTTSNIILPLSGNDKNPWTETLKCYNFPTTVALSEVFKNFSQVKECEEVSAPSFVKPEFYEFGRSPGMVERTRRVKLEVEPHYLIIAAAGWVLTRLGKAKVSEGDYVGVNVFTPTRGILYSLIQNVNGIVPGIKPETAFGLWIARKVVSSVTNPNVSVVRIYTISDAVGQNPTTINGGFSIDLTKLLEKRYLLSERLEAIARNALSISSNMRERYIVLANYIYEYLTGSKRLEDLLYFANRDLIMNLNSDDGKVRDLKLISAYVNGELIRGEG

SEQ ID NO: 47 - protein, 345 aa, Sulfolobus islandicus
MEVPLYNIFGDNYIIQVATEAENSTIYNNKVEIDDEELRNVLNLAYKIAKNNEDAAAERRGKAKKKKGEEGETTTSNIILPLSGNDKNPWTETLKCYNFPTTVALSEVFKNFSQVKECEEVSAPSFVKPEFYKFGRSPGMVERTRRVKLEVEPHYLIMAAAGWVLTRLGKAKVSEGDYVGVNVFTPTRGILYSLIQNVNGIVPGIKPETAFGLWIARKVVSSVTNPNVSVVSIYTISDAVGQNPTTINGGFSIDLTKLLEKRDLLSERLEAIARNALSISSNMRERYIVLANYIYEYLTGSKRLEDLLYFANRDLIMNLNSDDGKVRDLKLISAYVNGELIRGEG

SEQ ID NO: 48 - protein, 986 aa, Unknown
  Description of Unknown: Deltaproteobacteria CasX sequence
MEKRINKIRKKLSADNATKPVSRSGPMKTLLVRVMTDDLKKRLEKRRKKPEVMPQVISNNAANNLRMLLDDYTKMKEAILQVYWQEFKDDHVGLMCKFAQPASKKIDQNKLKPEMDEKGNLTTAGFACSQCGQPLFVYKLEQVSEKGKAYTNYFGRCNVAEHEKLILLAQLKPVKDSDEAVTYSLGKFGQRALDFYSIHVTKESTHPVKPLAQIAGNRYASGPVGKALSDACMGTIASFLSKYQDIIIEHQKVVKGNQKRLESLRELAGKENLEYPSVTLPPQPHTKEGVDAYNEVIARVRMWVNLNLWQKLKLSRDDAKPLLRLKGFPSFPVVERRENEVDWWNTINEVKKLIDAKRDMGRVFWSGVTAEKRNTILEGYNYLPNENDHKKREGSLENPKKPAKRQFGDLLLYLEKKYAGDWGKVFDEAWERIDKKIAGLTSHIEREEARNAEDAQSKAVLTDWLRAKASFVLERLKEMDEKEFYACEIQLQKWYGDLRGNPFAVEAENRVVDISGFSIGSDGHSIQYRNLLAWKYLENGKREFYLLMNYGKKGRIRFTDGTDIKKSGKWQGLLYGGGKAKVIDLTFDPDDEQLIILPLAFGTRQGREFIWNDLLSLETGLIKLANGRVIEKTIYNKKIGRDEPALFVALTFERREVVDPSNIKPVNLIGVARGENIPAVIALTDPEGCPLPEFKDSSGGPTDILRIGEGYKEKQRAIQAAKEVEQRRAGGYSRKFASKSRNLADDMVRNSARDLFYHAVTHDAVLVFANLSRGFGRQGKRTFMTERQYTKMEDWLTAKLAYEGLTSKTYLSKTLAQYTSKTCSNCGFTITYADMDVMLVRLKKTSDGWATTLNNKELKAEYQITYYNRYKRQTVEKELSAELDRLSEESGNNDISKWTKGRRDEALFLLKKRFSHRPVQEQFVCLDCGHEVHAAEQAALNIARSWLFLNSNSTEFKSYKSGKQPFVGAWQAFYKRRLKEVWKPNA

SEQ ID NO: 49 - protein, 1210 aa, Unknown
  Description of Unknown: uncultured Parcubacteria group bacterium sequence
MSKRHPRISGVKGYRLHAQRLEYTGKSGAMRTIKYPLYSSPSGGRTVPREIVSAINDDYVGLYGLSNFDDLYNAEKRNEEKVYSVLDFWYDCVQYGAVFSYTAPGLLKNVAEVRGGSYELTKTLKGSHLYDELQIDKVIKFLNKKEISRANGSLDKLKKDIIDCFKAEYRERHKDQCNKLADDIKNAKKDAGASLGERQKKLFRDFFGISEQSENDKPSFTNPLNLTCCLLPFDTVNNNRNRGEVLFNKLKEYAQKLDKNEGSLEMWEYIGIGNSGTAFSNFLGEGFLGRLRENKITELKKAMMDITDAWRGQEQEEELEKRLRILAALTIKLREPKFDNHWGGYRSDINGKLSSWLQNYINQTVKIKEDLKGHKKDLKKAKEMINRFGESDTKEEAVVSSLLESIEKIVPDDSADDEKPDIPAIAIYRRFLSDGRLTLNRFVQREDVQEALIKERLEAEKKKKPKKRKKKSDAEDEKETIDFKELFPHLAKPLKLVPNFYGDSKRELYKKYKNAAIYTDALWKAVEKIYKSAFSSSLKNSFFDTDFDKDFFIKRLQKIFSVYRRFNTDKWKPIVKNSFAPYCDIVSLAENEVLYKPKQSRSRKSAAIDKNRVRLPSTENIAKAGIALARELSVAGFDWKDLLKKEEHEEYIDLIELHKTALALLLAVTETQLDISALDFVENGTVKDFMKTRDGNLVLEGRFLEMFSQSIVFSELRGLAGLMSRKEFITRSAIQTMNGKQAELLYIPHEFQSAKITTPKEMSRAFLDLAPAEFATSLEPESLSEKSLLKLKQMRYYPHYFGYELTRTGQGIDGGVAENALRLEKSPVKKREIKCKQYKTLGRGQNKIVLYVRSSYYQTQFLEWFLHRPKNVQTDVAVSGSFLIDEKKVKTRWNYDALTVALEPVSGSERVFVSQPFTIFPEKSAEEEGQRYLGIDIGEYGIAYTALEITGDSAKILDQNFISDPQLKTLREEVKGLKLDQRRGTFAMPSTKIARIRESLVHSLRNRIHHLALKHKAKIVYELEVSRFEEGKQKIKKVYATLKKADVYSEIDADKNLQTTVWGKLAVASEISASYTSQFCGACKKLWRAEMQVDETITTQELIGTVRVIKGGTLIDAIKDFMRPPIFDENDTPFPKYRDFCDKHHISKKMRGNSCLFICPFCRANADADIQASQTIALLRYVKEEKKVEDYFERFRKLKNIKVLGQMKKI

SEQ ID NO: 50 - protein, 1140 aa, Bacillus hisashii
MAPKKKRKVGIHGVPAAATRSFILKIEPNEEVKKGLWKTHEVLNHGIAYYMNILKLIRQEAIYEHHEQDPKNPKKVSKAEIQAELWDFVLKMQKCNSFTHEVDKDEVFNILRELYEELVPSSVEKKGEANQLSNKFLYPLVDPNSQSGKGTASSGRKPRWYNLKIAGDPSWEEEKKKWEEDKKKDPLAKILGKLAEYGLIPLFIPYTDSNEPIVKEIKWMEKSRNQSVRRLDKDMFIQALERFLSWESWNLKVKEEYEKVEKEYKTLEERIKEDIQALKALEQYEKERQEQLLRDTLNTNEYRLSKRGLRGWREIIQKWLKMDENEPSEKYLEVFKDYQRKHPREAGDYSVYEFLSKKENHFIWRNHPEYPYLYATFCEIDKKKKDAKQQATFTLADPINHPLWVRFEERSGSNLNKYRILTEQLHTEKLKKKLTVQLDRLIYPTESGGWEEKGKVDIVLLPSRQFYNQIFLDIEEKGKHAFTYKDESIKFPLKGTLGGARVQFDRDHLRRYPHKVESGNVGRIYFNMTVNIEPTESPVSKSLKIHRDDFPKVVNFKPKELTEWIKDSKGKKLKSGIESLEIGLRVMSIDLGQRQAAAASIFEVVDQKPDIEGKLFFPIKGTELYAVHRASFNIKLPGETLVKSREVLRKAREDNLKLMNQKLNFLRNVLHFQQFEDITEREKRVTKWISRQENSDVPLVYQDELIQIRELMYKPYKDWVAFLKQLHKRLEVEIGKEVKHWRKSLSDGRKGLYGISLKNIDEIDRTRKFLLRWSLRPTEPGEVRRLEPGQRFAIDQLNHLNALKEDRLKKMANTIIMHALGYCYDVRKKKWQAKNPACQIILFEDLSNYNPYEERSRFENSKLMKWSRREIPRQVALQGEIYGLQVGEVGAQFSSRFHAKTGSPGIRCSVVTKEKLQDNRFFKNLQREGRLTLDKIAVLKEGDLYPDKGGEKFISLSKDRKCVTTHADINAAQNLQKRFWTRTHGFYKVYCKAYQVDGQTVYIPESKDQKQKIIEEFGEGYFILKDGVYEWVNAGKLKIKKGSSKQSSSELVDSDILKDSFDLASELKGEKLMLYRDPSGNVFPSDKWMAAGVFFGKLERILISKLTNQYSISTIEDDSSKQSMKRPAATKKAGQAKKKK

SEQ ID NO: 51 - DNA, 306 bp, Artificial Sequence
  Description of Artificial Sequence: Synthetic polynucleotide
tgcctgtcatacgaaaccgagatactgacagtagaatatggccttctgccaatcgggaagattgtggagaaacggatagaatgcacagtttactctgtcgataacaatggtaacatttatactcagccagttgcccagtggcacgaccggggagagcaggaagtattcgaatactgtctggaggatggaagtctcattagggccactaaggaccacaaatttatgacagtcgatggccagatgctgcctatagacgaaatctttgagcgagagttggacctcatgcgagttgacaaccttcctaat

SEQ ID NO: 52 - protein, 102 aa, Artificial Sequence
  Description of Artificial Sequence: Synthetic polypeptide
CLSYETEILTVEYGLLPIGKIVEKRIECTVYSVDNNGNIYTQPVAQWHDRGEQEVFEYCLEDGSLIRATKDHKFMTVDGQMLPIDEIFERELDLMRVDNLPN

SEQ ID NO: 53 - DNA, 108 bp, Artificial Sequence
  Description of Artificial Sequence: Synthetic polynucleotide
atgatcaagatagctacaaggaagtatcttggcaaacaaaacgtttatgatattggagtcgaaagagatcacaactttgctctgaagaacggattcatagcttctaat

SEQ ID NO: 54 - protein, 36 aa, Artificial Sequence
  Description of Artificial Sequence: Synthetic polypeptide
MIKIATRKYLGKQNVYDIGVERDHNFALKNGFIASN

SEQ ID NO: 55 - DNA, 303 bp, Artificial Sequence
  Description of Artificial Sequence: Synthetic polynucleotide
tgcctgtcttatgataccgagatacttaccgttgaatatggcttcttgcctattggaaagattgtcgaagagagaattgaatgcacagtatatactgtagacaagaatggtttcgtttacacacagcccattgctcaatggcacaatcgcggcgaacaagaagtatttgagtactgtctcgaggatggaagcatcatacgagcaactaaagatcataaattcatgaccactgacgggcagatgttgccaatagatgagatattcgagcggggcttggatctcaaacaagtggatggattgcca

SEQ ID NO: 56 - protein, 101 aa, Artificial Sequence
  Description of Artificial Sequence: Synthetic polypeptide
CLSYDTEILTVEYGFLPIGKIVEERIECTVYTVDKNGFVYTQPIAQWHNRGEQEVFEYCLEDGSIIRATKDHKFMTTDGQMLPIDEIFERGLDLKQVDGLP

SEQ ID NO: 57 - DNA, 159 bp, Artificial Sequence
  Description of Artificial Sequence: Synthetic polynucleotide
atgaagaggactgccgatggatcagagtttgaatctcccaagaagaagaggaaagtaaagataatatctcgaaaaagtcttggtacccaaaatgtctatgatattggagtggagaaagatcacaacttccttctcaagaacggtctcgtagccagcaac

SEQ ID NO: 58 - protein, 53 aa, Artificial Sequence
  Description of Artificial Sequence: Synthetic polypeptide
MKRTADGSEFESPKKKRKVKIISRKSLGTQNVYDIGVEKDHNFLLKNGLVASN

SEQ ID NO: 59 - protein, 24 aa, Artificial Sequence
  Description of Artificial Sequence: Synthetic peptide
SGGSSGSETPGTSESATPESSGGS

SEQ ID NO: 60 - protein, 32 aa, Artificial Sequence
  Description of Artificial Sequence: Synthetic polypeptide
SGGSSGGSSGSETPGTSESATPESSGGSSGGS

SEQ ID NO: 61 - protein, 104 aa, Artificial Sequence
  Description of Artificial Sequence: Synthetic polypeptide
GGSGGSPGSPAGSPTSTEEGTSESATPESGPGTSTEPSEGSAPGSPAGSPTSTEEGTSTEPSEGSAPGTSTEPSEGSAPGTSESATPESGPGSEPATSGGSGGS

SEQ ID NO: 62 - protein, 4 aa, Artificial Sequence
  Description of Artificial Sequence: Synthetic peptide
SGGS

SEQ ID NO: 63 - protein, 120 aa, Artificial Sequence
  Description of Artificial Sequence: Synthetic polypeptide
  MISC_FEATURE (1)..(120): This sequence may encompass 1-30 "Ser Gly Gly Ser" repeating units
SGGSSGGSSGGSSGGSSGGSSGGSSGGSSGGSSGGSSGGSSGGSSGGSSGGSSGGSSGGSSGGSSGGSSGGSSGGSSGGSSGGSSGGSSGGSSGGSSGGSSGGSSGGSSGGSSGGSSGGS

SEQ ID NO: 64 - protein, 120 aa, Artificial Sequence
  Description of Artificial Sequence: Synthetic polypeptide
  MISC_FEATURE (1)..(120): This sequence may encompass 1-30 "Gly Gly Gly Ser" repeating units
GGGSGGGSGGGSGGGSGGGSGGGSGGGSGGGSGGGSGGGSGGGSGGGSGGGSGGGSGGGSGGGSGGGSGGGSGGGSGGGSGGGSGGGSGGGSGGGSGGGSGGGSGGGSGGGSGGGSGGGS

SEQ ID NO: 65 - protein, 150 aa, Artificial Sequence
  Description of Artificial Sequence: Synthetic polypeptide
  MISC_FEATURE (1)..(150): This sequence may encompass 1-30 "Gly Gly Gly Gly Ser" repeating units
GGGGSGGGGSGGGGSGGGGSGGGGSGGGGSGGGGSGGGGSGGGGSGGGGSGGGGSGGGGSGGGGSGGGGSGGGGSGGGGSGGGGSGGGGSGGGGSGGGGSGGGGSGGGGSGGGGSGGGGSGGGGSGGGGSGGGGSGGGGSGGGGSGGGGS

SEQ ID NO: 66 - protein, 30 aa, Artificial Sequence
  Description of Artificial Sequence: Synthetic polypeptide
  MISC_FEATURE (1)..(30): This sequence may encompass 1-30 residues
GGGGGGGGGGGGGGGGGGGGGGGGGGGGGG

SEQ ID NO: 67 - protein, 150 aa, Artificial Sequence
  Description of Artificial Sequence: Synthetic polypeptide
  MISC_FEATURE (1)..(150): This sequence may encompass 1-30 "Glu Ala Ala Ala Lys" repeating units
EAAAKEAAAKEAAAKEAAAKEAAAKEAAAKEAAAKEAAAKEAAAKEAAAKEAAAKEAAAKEAAAKEAAAKEAAAKEAAAKEAAAKEAAAKEAAAKEAAAKEAAAKEAAAKEAAAKEAAAKEAAAKEAAAKEAAAKEAAAKEAAAKEAAAK

SEQ ID NO: 68 - protein, 90 aa, Artificial Sequence
  Description of Artificial Sequence: Synthetic polypeptide
  MISC_FEATURE (1)..(90): This sequence may encompass 1-30 "Gly Gly Ser" repeating units
GGSGGSGGSGGSGGSGGSGGSGGSGGSGGSGGSGGSGGSGGSGGSGGSGGSGGSGGSGGSGGSGGSGGSGGSGGSGGSGGSGGSGGSGGS

SEQ ID NO: 69 - protein, 16 aa, Artificial Sequence
  Description of Artificial Sequence: Synthetic peptide
SGSETPGTSESATPES

SEQ ID NO: 70 - protein, 60 aa, Artificial Sequence
  Description of Artificial Sequence: Synthetic polypeptide
  MOD_RES (1)..(1): Any amino acid
  MOD_RES (3)..(3): Any amino acid
  MOD_RES (5)..(5): Any amino acid
  MOD_RES (7)..(7): Any amino acid
  MOD_RES (9)..(9): Any amino acid
  MOD_RES (11)..(11): Any amino acid
  MOD_RES (13)..(13): Any amino acid
  MOD_RES (15)..(15): Any amino acid
  MOD_RES (17)..(17): Any amino acid
  MOD_RES (19)..(19): Any amino acid
  MOD_RES (21)..(21): Any amino acid
  MOD_RES (23)..(23): Any amino acid
  MOD_RES (25)..(25): Any amino acid
  MOD_RES (27)..(27): Any amino acid
  MOD_RES (29)..(29): Any amino acid
  MOD_RES (31)..(31): Any amino acid
  MOD_RES (33)..(33): Any amino acid
  MOD_RES (35)..(35): Any amino acid
  MOD_RES (37)..(37): Any amino acid
  MOD_RES (39)..(39): Any amino acid
  MOD_RES (41)..(41): Any amino acid
  MOD_RES (43)..(43): Any amino acid
  MOD_RES (45)..(45): Any amino acid
  MOD_RES (47)..(47): Any amino acid
  MOD_RES (49)..(49): Any amino acid
  MOD_RES (51)..(51): Any amino acid
  MOD_RES (53)..(53): Any amino acid
  MOD_RES (55)..(55): Any amino acid
  MOD_RES (57)..(57): Any amino acid
  MOD_RES (59)..(59): Any amino acid
  MISC_FEATURE (1)..(60): This sequence may encompass 1-30 "Xaa Pro" repeating units
XPXPXPXPXPXPXPXPXPXPXPXPXPXPXPXPXPXPXPXPXPXPXPXPXPXPXPXPXPXP

SEQ ID NO: 71 - protein, 24 aa, Artificial Sequence
  Description of Artificial Sequence: Synthetic peptide
SGGSSGGSSGSETPGTSESATPES

SEQ ID NO: 72 - protein, 40 aa, Artificial Sequence
  Description of Artificial Sequence: Synthetic polypeptide
SGGSSGGSSGSETPGTSESATPESSGGSSGGSSGGSSGGS

SEQ ID NO: 73 - protein, 64 aa, Artificial Sequence
  Description of Artificial Sequence: Synthetic polypeptide
SGGSSGGSSGSETPGTSESATPESSGGSSGGSSGGSSGGSSGSETPGTSESATPESSGGSSGGS

SEQ ID NO: 74 - protein, 92 aa, Artificial Sequence
  Description of Artificial Sequence: Synthetic polypeptide
PGSPAGSPTSTEEGTSESATPESGPGTSTEPSEGSAPGSPAGSPTSTEEGTSTEPSEGSAPGTSTEPSEGSAPGTSESATPESGPGSEPATS

SEQ ID NO: 75 - protein, 18 aa, Artificial Sequence
  Description of Artificial Sequence: Synthetic peptide
KRTADGSEFESPKKKRKV

SEQ ID NO: 76 - protein, 16 aa, Artificial Sequence
  Description of Artificial Sequence: Synthetic peptide
KRPAATKKAGQAKKKK

SEQ ID NO: 77 - protein, 17 aa, Artificial Sequence
  Description of Artificial Sequence: Synthetic peptide
KKTELQTTNAENKTKKL

SEQ ID NO: 78 - protein, 19 aa, Artificial Sequence
  Description of Artificial Sequence: Synthetic peptide
KRGINDRNFWRGENGRKTR

SEQ ID NO: 79 - protein, 16 aa, Artificial Sequence
  Description of Artificial Sequence: Synthetic peptide
RKSGKIAAIVVKRPRK

SEQ ID NO: 80 - protein, 7 aa, Artificial Sequence
  Description of Artificial Sequence: Synthetic peptide
PKKKRKV

SEQ ID NO: 81 - protein, 30 aa, Artificial Sequence
  Description of Artificial Sequence: Synthetic polypeptide
MDSLLMNRRKFLYQFKNVRWAKGRRETYLC

SEQ ID NO: 82 - protein, 84 aa, Bacillus phage PBS2
MTNLSDIIEKETGKQLVIQESILMLPEEVEEVIGNKPESDILVHTAYDESTDENVMLLTSDAPEYKPWALVIQDSNGENKIKML

SEQ ID NO: 83 - protein, 154 aa, Homo sapiens [sequence omitted]

SEQ ID NO: 84 - DNA, 910 bp, Homo sapiens
gcgtcgtagtctcctgcagcgtctggggtttccgttgcagtcctcggaaccaggacctcggcgtggcctagcgagttatggcgacgaaggccgtgtgcgtgctgaagggcgacggcccagtgcagggcatcatcaatttcgagcagaaggaaagtaatggaccagtgaaggtgtggggaagcattaaaggactgactgaaggcctgcatggattccatgttcatgagtttggagataatacagcaggctgtaccagtgcaggtcctcactttaatcctctatccagaaaacacggtgggccaaaggatgaagagaggcatgttggagacttgggcaatgtgactgctgacaaagatggtgtggccgatgtgtctattgaagattctgtgatctcactctcaggagaccattgcatcattggccgcacactggtggtccatgaaaaagcagatgacttgggcaaaggtggaaatgaagaaagtacaaagacaggaaacgctggaagtcgtttggcttgtggtgtaattgggatcgcccaataaacattcccttggatgtagtctgaggccccttaactcatctgttatcctgctagctgtagaaatgtatcctgataaacattaaacactgtaatcttaaaagtgtaattgtgtgactttttcagagttgctttaaagtacctgtagtgagaaactgatttatgatcacttggaagatttgtatagttttataaaactcagttaaaatgtctgtttcaatgacctgtattttgccagacttaaatcacagatgggtattaaacttgtcagaatttctttgtcattcaagcctgtgaataaaaaccctgtatggcacttattatgaggctattaaaagaatccaaattcaaactaaaaaaaaaaaaaaaaaa

SEQ ID NO: 85 - RNA, 80 nt, Artificial Sequence
  Description of Artificial Sequence: Synthetic oligonucleotide
guuuuagagcuagaaauagcaaguuaaaauaaggcuaguccguuaucaacuugaaaaaguggcaccgagucggugcuuuu

SEQ ID NO: 86 - protein, 1368 aa, Streptococcus pyogenes
MDKKYSIGLAIGTNSVGWAVITDEYKVPSKKFKVLGNTDRHSIKKNLIGALLFDSGETAEATRLKRTARRRYTRRKNRICYLQEIFSNEMAKVDDSFFHRLEESFLVEEDKKHERHPIFGNIVDEVAYHEKYPTIYHLRKKLVDSTDKADLRLIYLALAHMIKFRGHFLIEGDLNPDNSDVDKLFIQLVQTYNQLFEENPINASGVDAKAILSARLSKSRRLENLIAQLPGEKKNGLFGNLIALSLGLTPNFKSNFDLAEDAKLQLSKDTYDDDLDNLLAQIGDQYADLFLAAKNLSDAILLSDILRVNTEITKAPLSASMIKRYDEHHQDLTLLKALVRQQLPEKYKEIFFDQSKNGYAGYIDGGASQEEFYKFIKPILEKMDGTEELLVKLNREDLLRKQRTFDNGSIPHQIHLGELHAILRRQEDFYPFLKDNREKIEKILTFRIPYYVGPLARGNSRFAWMTRKSEETITPWNFEEVVDKGASAQSFIERMTNFDKNLPNEKVLPKHSLLYEYFTVYNELTKVKYVTEGMRKPAFLSGEQKKAIVDLLFKTNRKVTVKQLKEDYFKKIECFDSVEISGVEDRFNASLGTYHDLLKIIKDKDFLDNEENEDILEDIVLTLTLFEDREMIEERLKTYAHLFDDKVMKQLKRRRYTGWGRLSRKLINGIRDKQSGKTILDFLKSDGFANRNFMQLIHDDSLTFKEDIQKAQVSGQGDSLHEHIANLAGSPAIKKGILQTVKVVDELVKVMGRHKPENIVIEMARENQTTQKGQKNSRERMKRIEEGIKELGSQILKEHPVENTQLQNEKLYLYYLQNGRDMYVDQELDINRLSDYDVDHIVPQSFLKDDSIDNKVLTRSDKNRGKSDNVPSEEVVKKMKNYWRQLLNAKLITQRKFDNLTKAERGGLSELDKAGFIKRQLVETRQITKHVAQILDSRMNTKYDENDKLIREVKVITLKSKLVSDFRKDFQFYKVREINNYHHAHDAYLNAVVGTALIKKYPKLESEFVYGDYKVYDVRKMIAKSEQEIGKATAKYFFYSNIMNFFKTEITLANGEIRKRPLIETNGETGEIVWDKGRDFATVRKVLSMPQVNIVKKTEVQTGGFSKESILPKRNSDKLIARKKDWDPKKYGGFDSPTVAYSVLVVAKVEKGKSKKLKSVKELLGITIMERSSFEKNPIDFLEAKGYKEVKKDLIIKLPKYSLFELENGRKRMLASAGELQKGNELALPSKYVNFLYLASHYEKLKGSPEDNEQKQLFVEQHKHYLDEIIEQISEFSKRVILADANLDKVLSAYNKHRDKPIREQAENIIHLFTLTNLGAPAAFKYFDTTIDRKRYTSTKEVLDATLIHQSITGLYETRIDLSQLGGD

SEQ ID NO: 87 - protein, 1368 aa, Artificial Sequence; identical to SEQ ID NO: 86
  Description of Artificial Sequence: Synthetic polypeptide

SEQ ID NO: 88 - protein, 987 aa, Unknown
  Description of Unknown: Deltaproteobacteria CasX sequence
MEKRINKIRKKLSADNATKPVSRSGPMKTLLVRVMTDDLKKRLEKRRKKPEVMPQVISNNAANNLRMLLDDYTKMKEAILQVYWQEFKDDHVGLMCKFAQPASKKIDQNKLKPEMDEKGNLTTAGFACSQCGQPLFVYKLEQVSEKGKAYTNYFGRCNVAEHEKLILLAQLKPVKDSDEAVTYSLGKFGQRALDFYSIHVTKESTHPVKPLAQIAGNRYASGPVGKALSDACMGTIASFLSKYQDIIIEHQKVVKGNQKRLESLRELAGKENLEYPSVTLPPQPHTKEGVDFAYNEVIARVRMWVNLNLWQKLKLSRDDAKPLLRLKGFPSFPVVERRENEVDWWNTINEVKKLIDAKRDMGRVFWSGVTAEKRNTILEGYNYLPNENDHKKREGSLENPKKPAKRQFGDLLLYLEKKYAGDWGKVFDEAWERIDKKIAGLTSHIEREEARNAEDAQSKAVLTDWLRAKASFVLERLKEMDEKEFYACEIQLQKWYGDLRGNPFAVEAENRVVDISGFSIGSDGHSIQYRNLLAWKYLENGKREFYLLMNYGKKGRIRFTDGTDIKKSGKWQGLLYGGGKAKVIDLTFDPDDEQLIILPLAFGTRQGREFIWNDLLSLETGLIKLANGRVIEKTIYNKKIGRDEPALFVALTFERREVVDPSNIKPVNLIGVARGENIPAVIALTDPEGCPLPEFKDSSGGPTDILRIGEGYKEKQRAIQAAKEVEQRRAGGYSRKFASKSRNLADDMVRNSARDLFYHAVTHDAVLVFANLSRGFGRQGKRTFMTERQYTKMEDWLTAKLAYEGLTSKTYLSKTLAQYTSKTCSNCGFTITYADMDVMLVRLKKTSDGWATTLNNKELKAEYQITYYNRYKRQTVEKELSAELDRLSEESGNNDISKWTKGRRDEALFLLKKRFSHRPVQEQFVCLDCGHEVHAAEQAALNIARSWLFLNSNSTEFKSYKSGKQPFVGAWQAFYKRRLKEVWKPNA

SEQ ID NO: 89 - protein, 1082 aa, Neisseria meningitidis
MAAFKPNPINYILGLDIGIASVGWAMVEIDEDENPICLIDLGVRVFERAEVPKTGDSLAMARRLARSVRRLTRRRAHRLLRARRLLKREGVLQAADFDENGLIKSLPNTPWQLRAAALDRKLTPLEWSAVLLHLIKHRGYLSQRKNEGETADKELGALLKGVADNAHALQTGDFRTPAELALNKFEKESGHIRNQRGDYSHTFSRKDLQAELILLFEKQKEFGNPHVSGGLKEGIETLLMTQRPALSGDAVQKMLGHCTFEPAEPKAAKNTYTAERFIWLTKLNNLRILEQGSERPLTDTERATLMDEPYRKSKLTYAQARKLLGLEDTAFFKGLRYGKDNAEASTLMEMKAYHAISRALEKEGLKDKKSPLNLSPELQDEIGTAFSLFKTDEDITGRLKDRIQPEILEALLKHISFDKFVQISLKALRRIVPLMEQGKRYDEACAEIYGDHYGKKNTEEKIYLPPIPADEIRNPVVLRALSQARKVINGVVRRYGSPARIHIETAREVGKSFKDRKEIEKRQEENRKDREKAAAKFREYFPNFVGEPKSKDILKLRLYEQQHGKCLYSGKEINLGRLNEKGYVEIDHALPFSRTWDDSFNNKVLVLGSENQNKGNQTPYEYFNGKDNSREWQEFKARVETSRFPRSKKQRILLQKFDEDGFKERNLNDTRYVNRFLCQFVADRMRLTGKGKKRVFASNGQITNLLRGFWGLRKVRAENDRHHALDAVVVACSTVAMQQKITRFVRYKEMNAFDGKTIDKETGEVLHQKTHFPQPWEFFAQEVMIRVFGKPDGKPEFEEADTPEKLRTLLAEKLSSRPEAVHEYVTPLFVSRAPNRKMSGQGHMETVKSAKRLDEGVSVLRVPLTQLKLKDLEKMVNREREPKLYEALKARLEAHKDDPAKAFAEPFYKYDKAGNRTQQVKAVRVEQVQKTGVWVRNHNGIADNATMVRVDVFEKGDKYYLVPIYSWQVAKGILPDRAVVQGKDEEDWQLIDDSFNFKFSLHPNDLVEVITKKARMFGYFASCHRGTGNINIRIHDLDHKIGKNGILEGIGVKTALSFQKYQIDELGKEIRPCRLKKRPPVR

SEQ ID NO: 90 - protein, 1082 aa, Neisseria meningitidis
MAAFKPNPINYILGLDIGIASVGWAMVEIDEEENPIRLIDLGVRVFERAEVPKTGDSLAMARRLARSVRRLTRRRAHRLLRARRLLKREGVLQAADFDENGLIKSLPNTPWQLRAAALDRKLTPLEWSAVLLHLIKHRGYLSQRKNEGETADKELGALLKGVANNAHALQTGDFRTPAELALNKFEKESGHIRNQRGDYSHTFSRKDLQAELILLFEKQKEFGNPHVSGGLKEGIETLLMTQRPALSGDAVQKMLGHCTFEPAEPKAAKNTYTAERFIWLTKLNNLRILEQGSERPLTDTERATLMDEPYRKSKLTYAQARKLLGLEDTAFFKGLRYGKDNAEASTLMEMKAYHAISRALEKEGLKDKKSPLNLSSELQDEIGTAFSLFKTDEDITGRLKDRVQPEILEALLKHISFDKFVQISLKALRRIVPLMEQGKRYDEACAEIYGDHYGKKNTEEKIYLPPIPADEIRNPVVLRALSQARKVINGVVRRYGSPARIHIETAREVGKSFKDRKEIEKRQEENRKDREKAAAKFREYFPNFVGEPKSKDILKLRLYEQQHGKCLYSGKEINLVRLNEKGYVEIDHALPFSRTWDDSFNNKVLVLGSENQNKGNQTPYEYFNGKDNSREWQEFKARVETSRFPRSKKQRILLQKFDEDGFKECNLNDTRYVNRFLCQFVADHILLTGKGKRRVFASNGQITNLLRGFWGLRKVRAENDRHHALDAVVVACSTVAMQQKITRFVRYKEMNAFDGKTIDKETGKVLHQKTHFPQPWEFFAQEVMIRVFGKPDGKPEFEEADTPEKLRTLLAEKLSSRPEAVHEYVTPLFVSRAPNRKMSGAHKDTLRSAKRFVKHNEKISVKRVWLTEIKLADLENMVNYKNGREIELYEALKARLEAYGGNAKQAFDPKDNPFYKKGGQLVKAVRVEKTQESGVLLNKKNAYTIADNGDMVRVDVFCKVDKKGKNQYFIVPIYAWQVAENILPDIDCKGYRIDDSYTFCFSLHKYDLIAFQKDEKSKVEFAYYINCDSSNGRFYLAWHDKGSKEQQFRISTQNLVLIQKYQVNELGKEIRPCRLKKRPPVR

SEQ ID NO: 91 - protein, 1300 aa, Francisella novicida
MSIYQEFVNKYSLSKTLRFELIPQGKTLENIKARGLILDDEKRAKDYKKAKQIIDKYHQFFIEEILSSVCISEDLLQNYSDVYFKLKKSDDDNLQKDFKSAKDTIKKQISEYIKDSEKFKNLFNQNLIDAKKGQESDLILWLKQSKDNGIELFKANSDITDIDEALEIIKSFKGWTTYFKGFHENRKNVYSSNDIPTSIIYRIVDDNLPKFLENKAKYESLKDKAPEAINYEQIKKDLAEELTFDIDYKTSEVNQRVFSLDEVFEIANFNNYLNQSGITKFNTIIGGKFVNGENTKRKGINEYINLYSQQINDKTLKKYKMSVLFKQILSDTESKSFVIDKLEDDSDVVTTMQSFYEQIAAFKTVEEKSIKETLSLLFDDLKAQKLDLSKIYFKNDKSLTDLSQQVFDDYSVIGTAVLEYITQQIAPKNLDNPSKKEQELIAKKTEKAKYLSLETIKLALEEFNKHRDIDKQCRFEEILANFAAIPMIFDEIAQNKDNLAQISIKYQNQGKKDLLQASAEDDVKAIKDLLDQTNNLLHKLKIFHISQSEDKANILDKDEHFYLVFEECYFELANIVPLYNKIRNYITQKPYSDEKFKLNFENSTLANGWDKNKEPDNTAILFIKDDKYYLGVMNKKNNKIFDDKAIKENKGEGYKKIVYKLLPGANKMLPKVFFSAKSIKFYNPSEDILRIRNHSTHTKNGSPQKGYEKFEFNIEDCRKFIDFYKQSISKHPEWKDFGFRFSDTQRYNSIDEFYREVENQGYKLTFENISESYIDSVVNQGKLYLFQIYNKDFSAYSKGRPNLHTLYWKALFDERNLQDVVYKLNGEAELFYRKQSIPKKITHPAKEAIANKNKDNPKKESVFEYDLIKDKRFTEDKFFFHCPITINFKSSGANKFNDEINLLLKEKANDVHILSIDRGERHLAYYTLVDGKGNIIKQDTFNIIGNDRMKTNYHDKLAAIEKDRDSARKDWKKINNIKEMKEGYLSQVVHEIAKLVIEYNAIVVFEDLNFGFKRGRFKVEKQVYQKLEKMLIEKLNYLVFKDNEFDKTGGVLRAYQLTAPFETFKKMGKQTGIIYYVPAGFTSKICPVTGFVNQLYPKYESVSKSQEFFSKFDKICYNLDKGYFEFSFDYKNFGDKAAKGKWTIASFGSRLINFRNSDKNHNWDTREVYPTKELEKLLKDYSIEYGHGECIKAAICGESDKKFFAKLTSVLNTILQMRNSKTGTELDYLISPVADVNGNFFDSRQAPKNMPQDADANGAYHIGLKGLMLLGRIKNNQEGKKLNLVIKNEEYFEFVQNRNN

SEQ ID NO: 92 - protein, 1300 aa, Francisella novicida
MSIYQEFVNKYSLSKTLRFELIPQGKTLENIKARGLILDDEKRAKDYKKAKQIIDKYHQFFIEEILSSVCISEDLLQNYSDVYFKLKKSDDDNLQKDFKSAKDTIKKQISEYIKDSEKFKNLFNQNLIDAKKGQESDLILWLKQSKDNGIELFKANSDITDIDEALEIIKSFKGWTTYFKGFHENRKNVYSSNDIPTSIIYRIVDDNLPKFLENKAKYESLKDKAPEAINYEQIKKDLAEELTFDIDYKTSEVNQRVFSLDEVFEIANFNNYLNQSGITKFNTIIGGKFVNGENTKRKGINEYINLYSQQINDKTLKKYKMSVLFKQILSDTESKSFVIDKLEDDSDVVTTMQSFYEQIAAFKTVEEKSIKETLSLLFDDLKAQKLDLSKIYFKNDKSLTDLSQQVFDDYSVIGTAVLEYITQQIAPKNLDNPSKKEQELIAKKTEKAKYLSLETIKLALEEFNKHRDIDKQCRFEEILANFAAIPMIFDEIAQNKDNLAQISIKYQNQGKKDLLQASAEDDVKAIKDLLDQTNNLLHKLKIFHISQSEDKANILDKDEHFYLVFEECYFELANIVPLYNKIRNYITQKPYSDEKFKLNFENSTLANGWDKNKEPDNTAILFIKDDKYYLGVMNKKNNKIFDDKAIKENKGEGYKKIVYKLLPGANKMLPKVFFSAKSIKFYNPSEDILRIRNHSTHTKNGSPQKGYEKFEFNIEDCRKFIDFYKQSISKHPEWKDFGFRFSDTQRYNSIDEFYREVENQGYKLTFENISESYIDSVVNQGKLYLFQIYNKDFSAYSKGRPNLHTLYWKALFDERNLQDVVYKLNGEAELFYRKQSIPKKITHPAKEAIANKNKDNPKKESVFEYDLIKDKRFTEDKFFFHCPITINFKSSGANKFNDEINLLLKEKANDVHILSIARGERHLAYYTLVDGKGNIIKQDTFNIIGNDRMKTNYHDKLAAIEKDRDSARKDWKKINNIKEMKEGYLSQVVHEIAKLVIEYNAIVVFEDLNFGFKRGRFKVEKQVYQKLEKMLIEKLNYLVFKDNEFDKTGGVLRAYQLTAPFETFKKMGKQTGIIYYVPAGFTSKICPVTGFVNQLYPKYESVSKSQEFFSKFDKICYNLDKGYFEFSFDYKNFGDKAAKGKWTIASFGSRLINFRNSDKNHNWDTREVYPTKELEKLLKDYSIEYGHGECIKAAICGESDKKFFAKLTSVLNTILQMRNSKTGTELDYLISPVADVNGNFFDSRQAPKNMPQDADANGAYHIGLKGLMLLGRIKNNQEGKKLNLVIKNEEYFEFVQNRNN

SEQ ID NO: 93 - protein, 1300 aa, Francisella novicida
MSIYQEFVNKYSLSKTLRFELIPQGKTLENIKARGLILDDEKRAKDYKKAKQIIDKYHQFFIEEILSSVCISEDLLQNYSDVYFKLKKSDDDNLQKDFKSAKDTIKKQISEYIKDSEKFKNLFNQNLIDAKKGQESDLILWLKQSKDNGIELFKANSDITDIDEALEIIKSFKGWTTYFKGFHENRKNVYSSNDIPTSIIYRIVDDNLPKFLENKAKYESLKDKAPEAINYEQIKKDLAEELTFDIDYKTSEVNQRVFSLDEVFEIANFNNYLNQSGITKFNTIIGGKFVNGENTKRKGINEYINLYSQQINDKTLKKYKMSVLFKQILSDTESKSFVIDKLEDDSDVVTTMQSFYEQIAAFKTVEEKSIKETLSLLFDDLKAQKLDLSKIYFKNDKSLTDLSQQVFDDYSVIGTAVLEYITQQIAPKNLDNPSKKEQELIAKKTEKAKYLSLETIKLALEEFNKHRDIDKQCRFEEILANFAAIPMIFDEIAQNKDNLAQISIKYQNQGKKDLLQASAEDDVKAIKDLLDQTNNLLHKLKIFHISQSEDKANILDKDEHFYLVFEECYFELANIVPLYNKIRNYITQKPYSDEKFKLNFENSTLANGWDKNKEPDNTAILFIKDDKYYLGVMNKKNNKIFDDKAIKENKGEGYKKIVYKLLPGANKMLPKVFFSAKSIKFYNPSEDILRIRNHSTHTKNGSPQKGYEKFEFNIEDCRKFIDFYKQSISKHPEWKDFGFRFSDTQRYNSIDEFYREVENQGYKLTFENISESYIDSVVNQGKLYLFQIYNKDFSAYSKGRPNLHTLYWKALFDERNLQDVVYKLNGEAELFYRKQSIPKKITHPAKEAIANKNKDNPKKESVFEYDLIKDKRFTEDKFFFHCPITINFKSSGANKFNDEINLLLKEKANDVHILSIDRGERHLAYYTLVDGKGNIIKQDTFNIIGNDRMKTNYHDKLAAIEKDRDSARKDWKKINNIKEMKEGYLSQVVHEIAKLVIEYNAIVVFADLNFGFKRGRFKVEKQVYQKLEKMLIEKLNYLVFKDNEFDKTGGVLRAYQLTAPFETFKKMGKQTGIIYYVPAGFTSKICPVTGFVNQLYPKYESVSKSQEFFSKFDKICYNLDKGYFEFSFDYKNFGDKAAKGKWTIASFGSRLINFRNSDKNHNWDTREVYPTKELEKLLKDYSIEYGHGECIKAAICGESDKKFFAKLTSVLNTILQMRNSKTGTELDYLISPVADVNGNFFDSRQAPKNMPQDADANGAYHIGLKGLMLLGRIKNNQEGKKLNLVIKNEEYFEFVQNRNN

SEQ ID NO: 94 - protein, 1300 aa, Francisella novicida
MSIYQEFVNKYSLSKTLRFELIPQGKTLENIKARGLILDDEKRAKDYKKAKQIIDKYHQFFIEEILSSVCISEDLLQNYSDVYFKLKKSDDDNLQKDFKSAKDTIKKQISEYIKDSEKFKNLFNQNLIDAKKGQESDLILWLKQSKDNGIELFKANSDITDIDEALEIIKSFKGWTTYFKGFHENRKNVYSSNDIPTSIIYRIVDDNLPKFLENKAKYESLKDKAPEAINYEQIKKDLAEELTFDIDYKTSEVNQRVFSLDEVFEIANFNNYLNQSGITKFNTIIGGKFVNGENTKRKGINEYINLYSQQINDKTLKKYKMSVLFKQILSDTESKSFVIDKLEDDSDVVTTMQSFYEQIAAFKTVEEKSIKETLSLLFDDLKAQKLDLSKIYFKNDKSLTDLSQQVFDDYSVIGTAVLEYITQQIAPKNLDNPSKKEQELIAKKTEKAKYLSLETIKLALEEFNKHRDIDKQCRFEEILANFAAIPMIFDEIAQNKDNLAQISIKYQNQGKKDLLQASAEDDVKAIKDLLDQTNNLLHKLKIFHISQSEDKANILDKDEHFYLVFEECYFELANIVPLYNKIRNYITQKPYSDEKFKLNFENSTLANGWDKNKEPDNTAILFIKDDKYYLGVMNKKNNKIFDDKAIKENKGEGYKKIVYKLLPGANKMLPKVFFSAKSIKFYNPSEDILRIRNHSTHTKNGSPQKGYEKFEFNIEDCRKFIDFYKQSISKHPEWKDFGFRFSDTQRYNSIDEFYREVENQGYKLTFENISESYIDSVVNQGKLYLFQIYNKDFSAYSKGRPNLHTLYWKALFDERNLQDVVYKLNGEAELFYRKQSIPKKITHPAKEAIANKNKDNPKKESVFEYDLIKDKRFTEDKFFFHCPITINFKSSGANKFNDEINLLLKEKANDVHILSIDRGERHLAYYTLVDGKGNIIKQDTFNIIGNDRMKTNYHDKLAAIEKDRDSARKDWKKINNIKEMKEGYLSQVVHEIAKLVIEYNAIVVFEDLNFGFKRGRFKVEKQVYQKLEKMLIEKLNYLVFKDNEFDKTGGVLRAYQLTAPFETFKKMGKQTGIIYYVPAGFTSKICPVTGFVNQLYPKYESVSKSQEFFSKFDKICYNLDKGYFEFSFDYKNFGDKAAKGKWTIASFGSRLINFRNSDKNHNWDTREVYPTKELEKLLKDYSIEYGHGECIKAAICGESDKKFFAKLTSVLNTILQMRNSKTGTELDYLISPVADVNGNFFDSRQAPKNMPQDAAANGAYHIGLKGLMLLGRIKNNQEGKKLNLVIKNEEYFEFVQNRNN

SEQ ID NO: 95 - protein, 1300 aa, Francisella novicida
MSIYQEFVNKYSLSKTLRFELIPQGKTLENIKARGLILDDEKRAKDYKKAKQIIDKYHQFFIEEILSSVCISEDLLQNYSDVYFKLKKSDDDNLQKDFKSAKDTIKKQISEYIKDSEKFKNLFNQNLIDAKKGQESDLILWLKQSKDNGIELFKANSDITDIDEALEIIKSFKGWTTYFKGFHENRKNVYSSNDIPTSIIYRIVDDNLPKFLENKAKYESLKDKAPEAINYEQIKKDLAEELTFDIDYKTSEVNQRVFSLDEVFEIANFNNYLNQSGITKFNTIIGGKFVNGENTKRKGINEYINLYSQQINDKTLKKYKMSVLFKQILSDTESKSFVIDKLEDDSDVVTTMQSFYEQIAAFKTVEEKSIKETLSLLFDDLKAQKLDLSKIYFKNDKSLTDLSQQVFDDYSVIGTAVLEYITQQIAPKNLDNPSKKEQELIAKKTEKAKYLSLETIKLALEEFNKHRDIDKQCRFEEILANFAAIPMIFDEIAQNKDNLAQISIKYQNQGKKDLLQASAEDDVKAIKDLLDQTNNLLHKLKIFHISQSEDKANILDKDEHFYLVFEECYFELANIVPLYNKIRNYITQKPYSDEKFKLNFENSTLANGWDKNKEPDNTAILFIKDDKYYLGVMNKKNNKIFDDKAIKENKGEGYKKIVYKLLPGANKMLPKVFFSAKSIKFYNPSEDILRIRNHSTHTKNGSPQKGYEKFEFNIEDCRKFIDFYKQSISKHPEWKDFGFRFSDTQRYNSIDEFYREVENQGYKLTFENISESYIDSVVNQGKLYLFQIYNKDFSAYSKGRPNLHTLYWKALFDERNLQDVVYKLNGEAELFYRKQSIPKKITHPAKEAIANKNKDNPKKESVFEYDLIKDKRFTEDKFFFHCPITINFKSSGANKFNDEINLLLKEKANDVHILSIARGERHLAYYTLVDGKGNIIKQDTFNIIGNDRMKTNYHDKLAAIEKDRDSARKDWKKINNIKEMKEGYLSQVVHEIAKLVIEYNAIVVFADLNFGFKRGRFKVEKQVYQKLEKMLIEKLNYLVFKDNEFDKTGGVLRAYQLTAPFETFKKMGKQTGIIYYVPAGFTSKICPVTGFVNQLYPKYESVSKSQEFFSKFDKICYNLDKGYFEFSFDYKNFGDKAAKGKWTIASFGSRLINFRNSDKNHNWDTREVYPTKELEKLLKDYSIEYGHGECIKAAICGESDKKFFAKLTSVLNTILQMRNSKTGTELDYLISPVADVNGNFFDSRQAPKNMPQDADANGAYHIGLKGLMLLGRIKNNQEGKKLNLVIKNEEYFEFVQNRNN

SEQ ID NO: 96 - protein, 1300 aa, Francisella novicida
MSIYQEFVNKYSLSKTLRFELIPQGKTLENIKARGLILDDEKRAKDYKKAKQIIDKYHQFFIEEILSSVCISEDLLQNYSDVYFKLKKSDDDNLQKDFKSAKDTIKKQISEYIKDSEKFKNLFNQNLIDAKKGQESDLILWLKQSKDNGIELFKANSDITDIDEALEIIKSFKGWTTYFKGFHENRKNVYSSNDIPTSIIYRIVDDNLPKFLENKAKYESLKDKAPEAINYEQIKKDLAEELTFDIDYKTSEVNQRVFSLDEVFEIANFNNYLNQSGITKFNTIIGGKFVNGENTKRKGINEYINLYSQQINDKTLKKYKMSVLFKQILSDTESKSFVIDKLEDDSDVVTTMQSFYEQIAAFKTVEEKSIKETLSLLFDDLKAQKLDLSKIYFKNDKSLTDLSQQVFDDYSVIGTAVLEYITQQIAPKNLDNPSKKEQELIAKKTEKAKYLSLETIKLALEEFNKHRDIDKQCRFEEILANFAAIPMIFDEIAQNKDNLAQISIKYQNQGKKDLLQASAEDDVKAIKDLLDQTNNLLHKLKIFHISQSEDKANILDKDEHFYLVFEECYFELANIVPLYNKIRNYITQKPYSDEKFKLNFENSTLANGWDKNKEPDNTAILFIKDDKYYLGVMNKKNNKIFDDKAIKENKGEGYKKIVYKLLPGANKMLPKVFFSAKSIKFYNPSEDILRIRNHSTHTKNGSPQKGYEKFEFNIEDCRKFIDFYKQSISKHPEWKDFGFRFSDTQRYNSIDEFYREVENQGYKLTFENISESYIDSVVNQGKLYLFQIYNKDFSAYSKGRPNLHTLYWKALFDERNLQDVVYKLNGEAELFYRKQSIPKKITHPAKEAIANKNKDNPKKESVFEYDLIKDKRFTEDKFFFHCPITINFKSSGANKFNDEINLLLKEKANDVHILSIARGERHLAYYTLVDGKGNIIKQDTFNIIGNDRMKTNYHDKLAAIEKDRDSARKDWKKINNIKEMKEGYLSQVVHEIAKLVIEYNAIVVFEDLNFGFKRGRFKVEKQVYQKLEKMLIEKLNYLVFKDNEFDKTGGVLRAYQLTAPFETFKKMGKQTGIIYYVPAGFTSKICPVTGFVNQLYPKYESVSKSQEFFSKFDKICYNLDKGYFEFSFDYKNFGDKAAKGKWTIASFGSRLINFRNSDKNHNWDTREVYPTKELEKLLKDYSIEYGHGECIKAAICGESDKKFFAKLTSVLNTILQMRNSKTGTELDYLISPVADVNGNFFDSRQAPKNMPQDAAANGAYHIGLKGLMLLGRIKNNQEGKKLNLVIKNEEYFEFVQNRNN

SEQ ID NO: 97 - protein, 1300 aa, Francisella novicida
MSIYQEFVNKYSLSKTLRFELIPQGKTLENIKARGLILDDEKRAKDYKKAKQIIDKYHQFFIEEILSSVCISEDLLQNYSDVYFKLKKSDDDNLQKDFKSAKDTIKKQISEYIKDSEKFKNLFNQNLIDAKKGQESDLILWLKQSKDNGIELFKANSDITDIDEALEIIKSFKGWTTYFKGFHENRKNVYSSNDIPTSIIYRIVDDNLPKFLENKAKYESLKDKAPEAINYEQIKKDLAEELTFDIDYKTSEVNQRVFSLDEVFEIANFNNYLNQSGITKFNTIIGGKFVNGENTKRKGINEYINLYSQQINDKTLKKYKMSVLFKQILSDTESKSFVIDKLEDDSDVVTTMQSFYEQIAAFKTVEEKSIKETLSLLFDDLKAQKLDLSKIYFKNDKSLTDLSQQVFDDYSVIGTAVLEYITQQIAPKNLDNPSKKEQELIAKKTEKAKYLSLETIKLALEEFNKHRDIDKQCRFEEILANFAAIPMIFDEIAQNKDNLAQISIKYQNQGKKDLLQASAEDDVKAIKDLLDQTNNLLHKLKIFHISQSEDKANILDKDEHFYLVFEECYFELANIVPLYNKIRNYITQKPYSDEKFKLNFENSTLANGWDKNKEPDNTAILFIKDDKYYLGVMNKKNNKIFDDKAIKENKGEGYKKIVYKLLPGANKMLPKVFFSAKSIKFYNPSEDILRIRNHSTHTKNGSPQKGYEKFEFNIEDCRKFIDFYKQSISKHPEWKDFGFRFSDTQRYNSIDEFYREVENQGYKLTFENISESYIDSVVNQGKLYLFQIYNKDFSAYSKGRPNLHTLYWKALFDERNLQDVVYKLNGEAELFYRKQSIPKKITHPAKEAIANKNKDNPKKESVFEYDLIKDKRFTEDKFFFHCPITINFKSSGANKFNDEINLLLKEKANDVHILSIDRGERHLAYYTLVDGKGNIIKQDTFNIIGNDRMKTNYHDKLAAIEKDRDSARKDWKKINNIKEMKEGYLSQVVHEIAKLVIEYNAIVVFADLNFGFKRGRFKVEKQVYQKLEKMLIEKLNYLVFKDNEFDKTGGVLRAYQLTAPFETFKKMGKQTGIIYYVPAGFTSKICPVTGFVNQLYPKYESVSKSQEFFSKFDKICYNLDKGYFEFSFDYKNFGDKAAKGKWTIASFGSRLINFRNSDKNHNWDTREVYPTKELEKLLKDYSIEYGHGECIKAAICGESDKKFFAKLTSVLNTILQMRNSKTGTELDYLISPVADVNGNFFDSRQAPKNMPQDAAANGAYHIGLKGLMLLGRIKNNQEGKKLNLVIKNEEYFEFVQNRNN

SEQ ID NO: 98 - protein, 1300 aa, Francisella novicida
MSIYQEFVNKYSLSKTLRFELIPQGKTLENIKARGLILDDEKRAKDYKKAKQIIDKYHQFFIEEILSSVCISEDLLQNYSDVYFKLKKSDDDNLQKDFKSAKDTIKKQISEYIKDSEKFKNLFNQNLIDAKKGQESDLILWLKQSKDNGIELFKANSDITDIDEALEIIKSFKGWTTYFKGFHENRKNVYSSNDIPTSIIYRIVDDNLPKFLENKAKYESLKDKAPEAINYEQIKKDLAEELTFDIDYKTSEVNQRVFSLDEVFEIANFNNYLNQSGITKFNTIIGGKFVNGENTKRKGINEYINLYSQQINDKTLKKYKMSVLFKQILSDTESKSFVIDKLEDDSDVVTTMQSFYEQIAAFKTVEEKSIKETLSLLFDDLKAQKLDLSKIYFKNDKSLTDLSQQVFDDYSVIGTAVLEYITQQIAPKNLDNPSKKEQELIAKKTEKAKYLSLETIKLALEEFNKHRDIDKQCRFEEILANFAAIPMIFDEIAQNKDNLAQISIKYQNQGKKDLLQASAEDDVKAIKDLLDQTNNLLHKLKIFHISQSEDKANILDKDEHFYLVFEECYFELANIVPLYNKIRNYITQKPYSDEKFKLNFENSTLANGWDKNKEPDNTAILFIKDDKYYLGVMNKKNNKIFDDKAIKENKGEGYKKIVYKLLPGANKMLPKVFFSAKSIKFYNPSEDILRIRNHSTHTKNGSPQKGYEKFEFNIEDCRKFIDFYKQSISKHPEWKDFGFRFSDTQRYNSIDEFYREVENQGYKLTFENISESYIDSVVNQGKLYLFQIYNKDFSAYSKGRPNLHTLYWKALFDERNLQDVVYKLNGEAELFYRKQSIPKKITHPAKEAIANKNKDNPKKESVFEYDLIKDKRFTEDKFFFHCPITINFKSSGANKFNDEINLLLKEKANDVHILSIARGERHLAYYTLVDGKGNIIKQDTFNIIGNDRMKTNYHDKLAAIEKDRDSARKDWKKINNIKEMKEGYLSQVVHEIAKLVIEYNAIVVFADLNFGFKRGRFKVEKQVYQKLEKMLIEKLNYLVFKDNEFDKTGGVLRAYQLTAPFETFKKMGKQTGIIYYVPAGFTSKICPVTGFVNQLYPKYESVSKSQEFFSKFDKICYNLDKGYFEFSFDYKNFGDKAAKGKWTIASFGSRLINFRNSDKNHNWDTREVYPTKELEKLLKDYSIEYGHGECIKAAICGESDKKFFAKLTSVLNTILQMRNSKTGTELDYLISPVADVNGNFFDSRQAPKNMPQDAAANGAYHIGLKGLMLLGRIKNNQEGKKLNLVIKNEEYFEFVQNRNN

SEQ ID NO: 99 - protein, 1052 aa, Staphylococcus aureus
KRNYILGLDIGITSVGYGIIDYETRDVIDAGVRLFKEANVENNEGRRSKRGARRLKRRRRHRIQRVKKLLFDYNLLTDHSELSGINPYEARVKGLSQKLSEEEFSAALLHLAKRRGVHNVNEVEEDTGNELSTKEQISRNSKALEEKYVAELQLERLKKDGEVRGSINRFKTSDYVKEAKQLLKVQKAYHQLDQSFIDTYIDLLETRRTYYEGPGEGSPFGWKDIKEWYEMLMGHCTYFPEELRSVKYAYNADLYNALNDLNNLVITRDENEKLEYYEKFQIIENVFKQKKKPTLKQIAKEILVNEEDIKGYRVTSTGKPEFTNLKVYHDIKDITARKEIIENAELLDQIAKILTIYQSSEDIQEELTNLNSELTQEEIEQISNLKGYTGTHNLSLKAINLILDELWHTNDNQIAIFNRLKLVPKKVDLSQQKEIPTTLVDDFILSPVVKRSFIQSIKVINAIIKKYGLPNDIIIELAREKNSKDAQKMINEMQKRNRQTNERIEEIIRTTGKENAKYLIEKIKLHDMQEGKCLYSLEAIPLEDLLNNPFNYEVDHIIPRSVSFDNSFNNKVLVKQEENSKKGNRTPFQYLSSSDSKISYETFKKHILNLAKGKGRISKTKKEYLLEERDINRFSVQKDFINRNLVDTRYATRGLMNLLRSYFRVNNLDVKVKSINGGFTSFLRRKWKFKKERNKGYKHHAEDALIIANADFIFKEWKKLDKAKKVMENQMFEEKQAESMPEIETEQEYKEIFITPHQIKHIKDFKDYKYSHRVDKKPNRELINDTLYSTRKDDKGNTLIVNNLNGLYDKDNDKLKKLINKSPEKLLMYHHDPQTYQKLKLIMEQYGDEKNPLYKYYEETGNYLTKYSKKDNGPVIKKIKYYGNKLNAHLDITDDYPNSRNKVVKLSLKPYRFDVYLDNGVYKFVTVKNLDVIKKENYYEVNSKCYEEAKKLKKISNQAEFIASFYNNDLIKINGELYRVIGVNNDLLNRIEVNMIDITYREYLENMNDKRPPRIIKTIASKTQSIKKYSTDILGNLYEVKSKKHPQIIKKG

SEQ ID NO: 100 - protein, 1052 aa, Staphylococcus aureus
KRNYILGLDIGITSVGYGIIDYETRDVIDAGVRLFKEANVENNEGRRSKRGARRLKRRRRHRIQRVKKLLFDYNLLTDHSELSGINPYEARVKGLSQKLSEEEFSAALLHLAKRRGVHNVNEVEEDTGNELSTKEQISRNSKALEEKYVAELQLERLKKDGEVRGSINRFKTSDYVKEAKQLLKVQKAYHQLDQSFIDTYIDLLETRRTYYEGPGEGSPFGWKDIKEWYEMLMGHCTYFPEELRSVKYAYNADLYNALNDLNNLVITRDENEKLEYYEKFQIIENVFKQKKKPTLKQIAKEILVNEEDIKGYRVTSTGKPEFTNLKVYHDIKDITARKEIIENAELLDQIAKILTIYQSSEDIQEELTNLNSELTQEEIEQISNLKGYTGTHNLSLKAINLILDELWHTNDNQIAIFNRLKLVPKKVDLSQQKEIPTTLVDDFILSPVVKRSFIQSIKVINAIIKKYGLPNDIIIELAREKNSKDAQKMINEMQKRNRQTNERIEEIIRTTGKENAKYLIEKIKLHDMQEGKCLYSLEAIPLEDLLNNPFNYEVDHIIPRSVSFDNSFNNKVLVKQEEASKKGNRTPFQYLSSSDSKISYETFKKHILNLAKGKGRISKTKKEYLLEERDINRFSVQKDFINRNLVDTRYATRGLMNLLRSYFRVNNLDVKVKSINGGFTSFLRRKWKFKKERNKGYKHHAEDALIIANADFIFKEWKKLDKAKKVMENQMFEEKQAESMPEIETEQEYKEIFITPHQIKHIKDFKDYKYSHRVDKKPNRELINDTLYSTRKDDKGNTLIVNNLNGLYDKDNDKLKKLINKSPEKLLMYHHDPQTYQKLKLIMEQYGDEKNPLYKYYEETGNYLTKYSKKDNGPVIKKIKYYGNKLNAHLDITDDYPNSRNKVVKLSLKPYRFDVYLDNGVYKFVTVKNLDVIKKENYYEVNSKCYEEAKKLKKISNQAEFIASFYNNDLIKINGELYRVIGVNNDLLNRIEVNMIDITYREYLENMNDKRPPRIIKTIASKTQSIKKYSTDILGNLYEVKSKKHPQIIKKG

SEQ ID NO: 101 - protein, 1052 aa, Staphylococcus aureus
KRNYILGLDIGITSVGYGIIDYETRDVIDAGVRLFKEANVENNEGRRSKRGARRLKRRRRHRIQRVKKLLFDYNLLTDHSELSGINPYEARVKGLSQKLSEEEFSAALLHLAKRRGVHNVNEVEEDTGNELSTKEQISRNSKALEEKYVAELQLERLKKDGEVRGSINRFKTSDYVKEAKQLLKVQKAYHQLDQSFIDTYIDLLETRRTYYEGPGEGSPFGWKDIKEWYEMLMGHCTYFPEELRSVKYAYNADLYNALNDLNNLVITRDENEKLEYYEKFQIIENVFKQKKKPTLKQIAKEILVNEEDIKGYRVTSTGKPEFTNLKVYHDIKDITARKEIIENAELLDQIAKILTIYQSSEDIQEELTNLNSELTQEEIEQISNLKGYTGTHNLSLKAINLILDELWHTNDNQIAIFNRLKLVPKKVDLSQQKEIPTTLVDDFILSPVVKRSFIQSIKVINAIIKKYGLPNDIIIELAREKNSKDAQKMINEMQKRNRQTNERIEEIIRTTGKENAKYLIEKIKLHDMQEGKCLYSLEAIPLEDLLNNPFNYEVDHIIPRSVSFDNSFNNKVLVKQEEASKKGNRTPFQYLSSSDSKISYETFKKHILNLAKGKGRISKTKKEYLLEERDINRFSVQKDFINRNLVDTRYATRGLMNLLRSYFRVNNLDVKVKSINGGFTSFLRRKWKFKKERNKGYKHHAEDALIIANADFIFKEWKKLDKAKKVMENQMFEEKQAESMPEIETEQEYKEIFITPHQIKHIKDFKDYKYSHRVDKKPNRKLINDTLYSTRKDDKGNTLIVNNLNGLYDKDNDKLKKLINKSPEKLLMYHHDPQTYQKLKLIMEQYGDEKNPLYKYYEETGNYLTKYSKKDNGPVIKKIKYYGNKLNAHLDITDDYPNSRNKVVKLSLKPYRFDVYLDNGVYKFVTVKNLDVIKKENYYEVNSKCYEEAKKLKKISNQAEFIASFYKNDLIKINGELYRVIGVNNDLLNRIEVNMIDITYREYLENMNDKRPPHIIKTIASKTQSIKKYSTDILGNLYEVKSKKHPQIIKKG

SEQ ID NO: 102 - protein, 1129 aa, Alicyclobacillus acidiphilus
MAVKSMKVKLRLDNMPEIRAGLWKLHTEVNAGVRYYTEWLSLLRQENLYRRSPNGDGEQECYKTAEECKAELLERLRARQVENGHCGPAGSDDELLQLARQLYELLVPQAIGAKGDAQQIARKFLSPLADKDAVGGLGIAKAGNKPRWVRMREAGEPGWEEEKAKAEARKSTDRTADVLRALADFGLKPLMRVYTDSDMSSVQWKPLRKGQAVRTWDRDMFQQAIERMMSWESWNQRVGEAYAKLVEQKSRFEQKNFVGQEHLVQLVNQLQQDMKEASHGLESKEQTAHYLTGRALRGSDKVFEKWEKLDPDAPFDLYDTEIKNVQRRNTRRFGSHDLFAKLAEPKYQALWREDASFLTRYAVYNSIVRKLNHAKMFATFTLPDATAHPIWTRFDKLGGNLHQYTFLFNEFGEGRHAIRFQKLLTVEDGVAKEVDDVTVPISMSAQLDDLLPRDPHELVALYFQDYGAEQHLAGEFGGAKIQYRRDQLNHLHARRGARDVYLNLSVRVQSQSEARGERRPPYAAVFRLVGDNHRAFVHFDKLSDYLAEHPDDGKLGSEGLLSGLRVMSVDLGLRTSASISVFRVARKDELKPNSEGRVPFCFPIEGNENLVAVHERSQLLKLPGETESKDLRAIREERQRTLRQLRTQLAYLRLLVRCGSEDVGRRERSWAKLIEQPMDANQMTPDWREAFEDELQKLKSLYGICGDREWTEAVYESVRRVWRHMGKQVRDWRKDVRSGERPKIRGYQKDVVGGNSIEQIEYLERQYKFLKSWSFFGKVSGQVIRAEKGSRFAITLREHIDHAKEDRLKKLADRIIMEALGYVYALDDERGKGKWVAKYPPCQLILLEELSEYQFNNDRPPSENNQLMQWSHRGVFQELLNQAQVHDLLVGTMYAAFSSRFDARTGAPGIRCRRVPARCAREQNPEPFPWWLNKFVAEHKLDGCPLRADDLIPTGEGEFFVSPFSAEEGDFHQIHADLNAAQNLQRRLWSDFDISQIRLRCDWGEVDGEPVLIPRTTGKRTADSYGNKVFYTKTGVTYYERERGKKRRKVFAQEELSEEEAELLVEADEAREKSVVLMRDPSGIINRGDWTRQKEFWSMVNQRIEGYLVKQIRSRVRLQESACENTGDI

SEQ ID NO: 103 - DNA, 47 bp, Artificial Sequence
  Description of Artificial Sequence: Synthetic oligonucleotide
gggaaataagagagaaaagaagagtaagaagaaatataagagccacc

SEQ ID NO: 104 - DNA, 101 bp, Artificial Sequence
  Description of Artificial Sequence: Synthetic polynucleotide
gctggagcctcggtggccatgcttcttgccccttgggcctccccccagcccctcctccccttcctgcacccgtacccccgtggtctttgaataaagtctga

SEQ ID NO: 105 - DNA, 3420 bp, Artificial Sequence
  Description of Artificial Sequence: Synthetic polynucleotide
atggccccaaagaagaagcggaaggtcggtatccacggagtcccagcagccgccaccagatccttcatcctgaagatcgagcccaacgaggaagtgaagaaaggcctctggaaaacccacgaggtgctgaaccacggaatcgcctactacatgaatatcctgaagctgatccggcaagaggccatctacgagcaccacgagcaggaccccaagaatcccaagaaggtgtccaaggccgagatccaggccgagctgtgggatttcgtgctgaagatgcagaagtgcaacagcttcacacacgaggtggacaaggacgaggtgttcaacatcctgagagagctgtacgaggaactggtgcccagcagcgtggaaaagaagggcgaagccaaccagctgagcaacaagtttctgtaccctctggtggaccccaacagccagtctggaaagggaacagccagcagcggcagaaagcccagatggtacaacctgaagattgccggcgatccctcctgggaagaagagaagaagaagtgggaagaagataagaaaaaggacccgctggccaagatcctgggcaagctggctgagtacggactgatccctctgttcatcccctacaccgacagcaacgagcccatcgtgaaagaaatcaagtggatggaaaagtcccggaaccagagcgtgcggcggctggataaggacatgttcattcaggccctggaacggttcctgagctgggagagctggaacctgaaagtgaaagaggaatacgagaaggtcgagaaagagtacaagaccctggaagagaggatcaaagaggacatccaggctctgaaggctctggaacagtatgagaaagagcggcaagaacagctgctgcgggacaccctgaacaccaacgagtaccggctgagcaagagaggccttagaggctggcgggaaatcatccagaaatggctgaaaatggacgagaacgagccctccgagaagtacctggaagtgttcaaggactaccagcggaagcaccctagagaggccggcgattacagcgtgtacgagttcctgtccaagaaagagaaccacttcatctggcggaatcaccctgagtacccctacctgtacgccaccttctgcgagatcgacaagaaaaagaaggacgccaagcagcaggccaccttcacactggccgatcctatcaatcaccctctgtgggtccgattcgaggaaagaagcggcagcaacctgaacaagtacagaatcctgaccgagcagctgcacaccgagaagctgaagaaaaagctgacagtgcagctggaccggctgatctaccctacagaatctggcggctgggaagagaagggcaaagtggacattgtgctgctgcccagccggcagttctacaaccagatcttcctggacatcgaggaaaagggcaagcacgccttcacctacaaggatgagagcatcaagttccctctgaagggcacactcggcggagccagagtgcagttcgacagagatcacctgagaagataccctcacaaggtggaaagcggcaacgtgggcagaatctacttcaacatgaccgtgaacatcgagcctacagagtccccagtgtccaagtctctgaagatccaccgggacgacttccccaaggtggtcaacttcaagcccaaagaactgaccgagtggatcaaggacagcaagggcaagaaactgaagtccggcatcgagtccctggaaatcggcctgagagtgatgagcatcgacctgggacagagacaggccgctgccgcctctattttcgaggtggtggatcagaagcccgacatcgaaggcaagctgtttttcccaatcaagggcaccgagctgtatgccgtgcacagagccagcttcaacatcaagctgcccggcgagacactggtcaagagcagagaagtgctgcggaaggccagagaggacaatctgaaactgatgaaccagaagctcaacttcctgcggaacgtgctgcacttccagcagttcgaggacatcaccgagagagagaagcgggtcaccaagtggatcagcagacaagagaacagcgacgtgcccctggtgtaccaggatgagctgatccagatccgcgagctgatgtacaagccttacaaggactgggtcgccttcctgaagcagctccacaagagactggaagtcgagatcggcaaagaagtgaagcactggcggaagtccctgagcgacggaagaaagggcctgtacggcatctccctgaagaacatcgacgagatcgatcggacccggaagttcctgctgagatggtccctgaggcctaccgaacctggcgaagtgcgtagactggaacccggccagagattcgccatcgaccagctgaatcacctgaacgccctgaaagaagatcggctgaagaagatggccaacaccatcatcatgcacgccctgggctactgctacgacgtgcggaagaagaaatggcaggctaagaaccccgcctgccagatcatcctgttcgaggatctgagcaactacaacccctacgaggaaaggtcccgcttcgagaacagcaagctcatgaagtggtccagacgcgagatccccagacaggttgcactgcagggcgagatctatggcctgcaagtgggagaagtgggcgctcagttcagcagcagattccacgccaagacaggcagccctggcatcagatgtagcgtcgtgaccaaagagaagctgcaggacaatcggttcttcaagaatctgcagagagagggcagactgaccctggacaaaatcgccgtgctgaaagagggcgatctgtacccagacaaaggcggcgagaagttcatcagcctgagcaaggatcggaagtgcgtgaccacacacgccgacatcaacgccgctcagaacctgcagaagcggttctggacaagaacccacggcttctacaaggtgtactgcaaggcctaccaggtggacggccagaccgtgtacatccctgagagcaaggaccagaagcagaagatcatcgaagagttcggcgagggctacttcattctgaaggacggggtgtacgaatgggtcaacgccggcaagctgaaaatcaagaagggcagctccaagcagagcagcagcgagctggtggatagcgacatcctgaaagacagcttcgacctggcctccgagctgaaaggcgaaaagctgatgctgtacagggaccccagcggcaatgtgttccccagcgacaaatggatggccgctggcgtgttcttcggaaagctggaacgcatcctgatcagcaagctgaccaaccagtactccatcagcaccatcgaggacgacagcagcaagcagtctatgaaaaggccggcggccacgaaaaaggccggccaggcaaaaaagaaaaag

SEQ ID NO: 106 - protein, 1112 aa, Bacillus sp.
MAIRSIKLKMKTNSGTDSIYLRKALWRTHQLINEGIAYYMNLLTLYRQEAIGDKTKEAYQAELINIIRNQQRNNGSSEEHGSDQEILALLRQLYELIIPSSIGESGDANQLGNKFLYPLVDPNSQSGKGTSNAGRKPRWKRLKEEGNPDWELEKKKDEERKAKDPTVKIFDNLNKYGLLPLFPLFTNIQKDIEWLPLGKRQSVRKWDKDMFIQAIERLLSWESWNRRVADEYKQLKEKTESYYKEHLTGGEEWIEKIRKFEKERNMELEKNAFAPNDGYFITSRQIRGWDRVYEKWSKLPESASPEELWKVVAEQQNKMSEGFGDPKVFSFLANRENRDIWRGHSERIYHIAAYNGLQKKLSRTKEQATFTLPDAIEHPLWIRYESPGGTNLNLFKLEEKQKKNYYVTLSKIIWPSEEKWIEKENIEIPLAPSIQFNRQIKLKQHVKGKQEISFSDYSSRISLDGVLGGSRIQFNRKYIKNHKELLGEGDIGPVFFNLVVDVAPLQETRNGRLQSPIGKALKVISSDFSKVIDYKPKELMDWMNTGSASNSFGVASLLEGMRVMSIDMGQRTSASVSIFEVVKELPKDQEQKLFYSINDTELFAIHKRSFLLNLPGEVVTKNNKQQRQERRKKRQFVRSQIRMLANVLRLETKKTPDERKKAIHKLMEIVQSYDSWTASQKEVWEKELNLLTNMAAFNDEIWKESLVELHHRIEPYVGQIVSKWRKGLSEGRKNLAGISMWNIDELEDTRRLLISWSKRSRTPGEANRIETDEPFGSSLLQHIQNVKDDRLKQMANLIIMTALGFKYDKEEKDRYKRWKETYPACQIILFENLNRYLFNLDRSRRENSRLMKWAHRSIPRTVSMQGEMFGLQVGDVRSEYSSRFHAKTGAPGIRCHALTEEDLKAGSNTLKRLIEDGFINESELAYLKKGDIIPSQGGELFVTLSKRYKKDSDNNELTVIHADINAAQNLQKRFWQQNSEVYRVPCQLARMGEDKLYIPKSQTETIKKYFGKGSFVKNNTEQEVYKWEKSEKMKIKTDTTFDLQDLDGFEDISKTIELAQEQQKKYLTMFRDPSGYFFNNETWRPQKEYWSIVNNIIKSCLKKKILSNKVEL

SEQ ID NO: 107 - protein, 1108 aa, Bacillus thermoamylovorans
MATRSFILKIEPNEEVKKGLWKTHEVLNHGIAYYMNILKLIRQEAIYEHHEQDPKNPKKVSKAEIQAELWDFVLKMQKCNSFTHEVDKDVVFNILRELYEELVPSSVEKKGEANQLSNKFLYPLVDPNSQSGKGTASSGRKPRWYNLKIAGDPSWEEEKKKWEEDKKKDPLAKILGKLAEYGLIPLFIPFTDSNEPIVKEIKWMEKSRNQSVRRLDKDMFIQALERFLSWESWNLKVKEEYEKVEKEHKTLEERIKEDIQAFKSLEQYEKERQEQLLRDTLNTNEYRLSKRGLRGWREIIQKWLKMDENEPSEKYLEVFKDYQRKHPREAGDYSVYEFLSKKENHFIWRNHPEYPYLYATFCEIDKKKKDAKQQATFTLADPINHPLWVRFEERSGSNLNKYRILTEQLHTEKLKKKLTVQLDRLIYPTESGGWEEKGKVDIVLLPSRQFYNQIFLDIEEKGKHAFTYKDESIKFPLKGTLGGARVQFDRDHLRRYPHKVESGNVGRIYFNMTVNIEPTESPVSKSLKIHRDDFPKFVNFKPKELTEWIKDSKGKKLKSGIESLEIGLRVMSIDLGQRQAAAASIFEVVDQKPDIEGKLFFPIKGTELYAVHRASFNIKLPGETLVKSREVLRKAREDNLKLMNQKLNFLRNVLHFQQFEDITEREKRVTKWISRQENSDVPLVYQDELIQIRELMYKPYKDWVAFLKQLHKRLEVEIGKEVKHWRKSLSDGRKGLYGISLKNIDEIDRTRKFLLRWSLRPTEPGEVRRLEPGQRFAIDQLNHLNALKEDRLKKMANTIIMHALGYCYDVRKKKWQAKNPACQIILFEDLSNYNPYEERSRFENSKLMKWSRREIPRQVALQGEIYGLQVGEVGAQFSSRFHAKTGSPGIRCSVVTKEKLQDNRFFKNLQREGRLTLDKIAVLKEGDLYPDKGGEKFISLSKDRKLVTTHADINAAQNLQKRFWTRTHGFYKVYCKAYQVDGQTVYIPESKDQKQKIIEEFGEGYFILKDGVYEWGNAGKLKIKKGSSKQSSSELVDSDILKDSFDLASELKGEKLMLYRDPSGNVFPSDKWMAAGVFFGKLERILISKLTNQYSISTIEDDSSKQSM

SEQ ID NO: 108 - protein, 1302 aa, Artificial Sequence
  Description of Artificial Sequence: Synthetic polypeptide
MQTKKTHLHLISAKASRKYRRTIACLSDTAKKDLERRKQSGAADPAQELSCLKTIKFKLEVPEGSKLPSFDRISQIYNALETIEKGSLSYLLFALILSGFRIFPNSSAAKTFASSSCYKNDQFASQIKEIFGEMVKNFIPSELESILKKGRRKNNKDWTEENIKRVLNSEFGRKNSEGSSALFDSFLSKFSQELFRKFDSWNEVNKKYLEAAELLDSMLASYGPFDSVCKMIGDSDSRNSLPDKSTIAFTNNAEITVDIESSVMPYMAIAALLREYRQSKSKAAPVAYVQSHLTTTNGNGLSWFFKFGLDLIRKAPVSSKQSTSDGSKSLQELFSVPDDKLDGLKFIKEACEALPEASLLCGEKGELLGYQDFRTSFAGHIDSWVANYVNRLFELIELVNQLPESIKLPSILTQKNHNLVASLGLQEAEVSHSLELFEGLVKNVRQTLKKLAGIDISSSPNEQDIKEFYAFSDVLNRLGSIRNQIENAVQTAKKDKIDLESAIEWKEWKKLKKLPKLNGLGGGVPKQQELLDKALESVKQIRHYQRIDFERVIQWAVNEHCLETVPKFLVDAEKKKINKESSTDFAAKENAVRFLLEGIGAAARGKTDSVSKAAYNWFVVNNFLAKKDLNRYFINCQGCIYKPPYSKRRSLAFALRSDNKDTIEVVWEKFETFYKEISKEIEKFNIFSQEFQTFLHLENLRMKLLLRRIQKPIPAEIAFFSLPQEYYDSLPPNVAFLALNQEITPSEYITQFNLYSSFLNGNLILLRRSRSYLRAKFSWVGNSKLIYAAKEARLWKIPNAYWKSDEWKMILDSNVLVFDKAGNVLPAPTLKKVCEREGDLRLFYPLLRQLPHDWCYRNPFVKSVGREKNVIEVNKEGEPKVASALPGSLFRLIGPAPFKSLLDDCFFNPLDKDLRECMLIVDQEISQKVEAQKVEASLESCTYSIAVPIRYHLEEPKVSNQFENVLAIDQGEAGLAYAVFSLKSIGEAETKPIAVGTIRIPSIRRLIHSVSTYRKKKQRLQNFKQNYDSTAFIMRENVTGDVCAKIVGLMKEFNAFPVLEYDVKNLESGSRQLSAVYKAVNSHFLYFKEPGRDALRKQLWYGGDSWTIDGIEIVTRERKEDGKEGVEKIVPLKVFPGRSVSARFTSKTCSCCGRNVFDWLFTEKKAKTNKKFNVNSKGELTTADGVIQLFEADRSKGPKFYARRKERTPLTKPIAKGSYSLEEIERRVRTNLRRAPKSKQSRDTSQSQYFCVYKDCALHFSGMQADENAAINIGRRFLTALRKNRRSDFPSNVKISDRLLDN

SEQ ID NO: 109 - protein, 1218 aa, Artificial Sequence
  Description of Artificial Sequence: Synthetic polypeptide
MTKHSIPLHAFRNSGADARKWKGRIALLAKRGKETMRTLQFPLEMSEPEAAAINTTPFAVAYNAIEGTGKGTLFDYWAKLHLAGFRFFPSGGAATIFRQQAVFEDASWNAAFCQQSGKDWPWLVPSKLYERFTKAPREVAKKDGSKKSIEFTQENVANESHVSLVGASITDKTPEDQKEFFLKMAGALAEKFDSWKSANEDRIVAMKVIDEFLKSEGLHLPSLENIAVKCSVETKPDNATVAWHDAPMSGVQNLAIGVFATCASRIDNIYDLNGGKLSKLIQESATTPNVTALSWLFGKGLEYFRTTDIDTIMQDFNIPASAKESIKPLVESAQAIPTMTVLGKKNYAPFRPNFGGKIDSWIANYASRLMLLNDILEQIEPGFELPQALLDNETLMSGIDMTGDELKELIEAVYAWVDAAKQGLATLLGRGGNVDDAVQTFEQFSAMMDTLNGTLNTISARYVRAVEMAGKDEARLEKLIECKFDIPKWCKSVPKLVGISGGLPKVEEEIKVMNAAFKDVRARMFVRFEEIAAYVASKGAGMDVYDALEKRELEQIKKLKSAVPERAHIQAYRAVLHRIGRAVQNCSEKTKQLFSSKVIEMGVFKNPSHLNNFIFNQKGAIYRSPFDRSRHAPYQLHADKLLKNDWLELLAEISATLMASESTEQMEDALRLERTRLQLQLSGLPDWEYPASLAKPDIEVEIQTALKMQLAKDTVTSDVLQRAFNLYSSVLSGLTFKLLRRSFSLKMRFSVADTTQLIYVPKVCDWAIPKQYLQAEGEIGIAARVVTESSPAKMVTEVEMKEPKALGHFMQQAPHDWYFDASLGGTQVAGRIVEKGKEVGKERKLVGYRMRGNSAYKTVLDKSLVGNTELSQCSMIIEIPYTQTVDADFRAQVQAGLPKVSINLPVKETITASNKDEQMLFDRFVAIDLGERGLGYAVFDAKTLELQESGHRPIKAITNLLNRTHHYEQRPNQRQKFQAKFNVNLSELRENTVGDVCHQINRICAYYNAFPVLEYMVPDRLDKQLKSVYESVTNRYIWSSTDAHKSARVQFWLGGETWEHPYLKSAKDKKPLVLSPGRGASGKGTSQTCSCCGRNPFDLIKDMKPRAKIAVVDGKAKLENSELKLFERNLESKDDMLARRHRNERAGMEQPLTPGNYTVDEIKALLRANLRRAPKNRRTKDTTVSEYHCVFSDCGKTMHADENAAVNIGGKFIADIEK

SEQ ID NO: 110 - protein, 1252 aa, Oleiphilus sp.
MTKLRHRQKKLTHDWAGSKKREVLGSNGKLQNPLLMPVKKGQVTEFRKAFSAYARATKGEMTDGRKNMFTHSFEPFKTKPSLHQCELADKAYQSLHSYLPGSLAHFLLSAHALGFRIFSKSGEATAFQASSKIEAYESKLASELACVDLSIQNLTISTLFNALTTSVRGKGEETSADPLIARFYTLLTGKPLSRDTQGPERDLAEVISRKIASSFGTWKEMTANPLQSLQFFEEELHALDANVSLSPAFDVLIKMNDLQGDLKNRTIVFDPDAPVFEYNAEDPADIIIKLTARYAKEAVIKNQNVGNYVKNAITTTNANGLGWLLNKGLSLLPVSTDDELLEFIGVERSHPSCHALIELIAQLEAPELFEKNVFSDTRSEVQGMIDSAVSNHIARLSSSRNSLSMDSEELERLIKSFQIHTPHCSLFIGAQSLSQQLESLPEALQSGVNSADILLGSTQYMLTNSLVEESIATYQRTLNRINYLSGVAGQINGAIKRKAIDGEKIHLPAAWSELISLPFIGQPVIDVESDLAHLKNQYQTLSNEFDTLISALQKNFDLNFNKALLNRTQHFEAMCRSTKKNALSKPEIVSYRDLLARLTSCLYRGSLVLRRAGIEVLKKHKIFESNSELREHVHERKHFVFVSPLDRKAKKLLRLTDSRPDLLHVIDEILQHDNLENKDRESLWLVRSGYLLAGLPDQLSSSFINLPIITQKGDRRLIDLIQYDQINRDAFVMLVTSAFKSNLSGLQYRANKQSFVVTRTLSPYLGSKLVYVPKDKDWLVPSQMFEGRFADILQSDYMVWKDAGRLCVIDTAKHLSNIKKSVFSSEEVLAFLRELPHRTFIQTEVRGLGVNVDGIAFNNGDIPSLKTFSNCVQVKVSRTNTSLVQTLNRWFEGGKVSPPSIQFERAYYKKDDQIHEDAAKRKIRFQMPATELVHASDDAGWTPSYLLGIDPGEYGMGLSLVSINNGEVLDSGFIHINSLINFASKKSNHQTKVVPRQQYKSPYANYLEQSKDSAAGDIAHILDRLIYKLNALPVFEALSGNSQSAADQVWTKVLSFYTWGDNDAQNSIRKQHWFGASHWDIKGMLRQPPTEKKPKPYIAFPGSQVSSYGNSQRCSCCGRNPIEQLREMAKDTSIKELKIRNSEIQLFDGTIKLFNPDPSTVIERRRHNLGPSRIPVADRTFKNISPSSLEFKELITIVSRSIRHSPEFIAKKRGIGSEYFCAYSDCNSSLNSEANAAANVAQKFQKQLFFEL

SEQ ID NO: 111 - protein, 767 aa, Artificial Sequence
  Description of Artificial Sequence: Synthetic polypeptide
MAQASSTPAVSPRPRPRYREERTLVRKLLPRPGQSKQEFRENVKKLRKAFLQFNADVSGVCQWAIQFRPRYGKPAEPTETFWKFFLEPETSLPPNDSRSPEFRRLQAFEAAAGINGAAALDDPAFTNELRDSILAVASRPKTKEAQRLFSRLKDYQPAHRMILAKVAAEWIESRYRRAHQNWERNYEEWKKEKQEWEQNHPELTPEIREAFNQIFQQLEVKEKRVRICPAARLLQNKDNCQYAGKNKHSVLCNQFNEFKKNHLQGKAIKFFYKDAEKYLRCGLQSLKPNVQGPFREDWNKYLRYMNLKEETLRGKNGGRLPHCKNLGQECEFNPHTALCKQYQQQLSSRPDLVQHDELYRKWRREYWREPRKPVFRYPSVKRHSIAKIFGENYFQADFKNSVVGLRLDSMPAGQYLEFAFAPWPRNYRPQPGETEISSVHLHFVGTRPRIGFRFRVPHKRSRFDCTQEELDELRSRTFPRKAQDQKFLEAARKRLLETFPGNAEQELRLLAVDLGTDSARAAFFIGKTFQQAFPLKIVKIEKLYEQWPNQKQAGDRRDASSKQPRPGLSRDHVGRHLQKMRAQASEIAQKRQELTGTPAPETTTDQAAKKATLQPFDLRGLTVHTARMIRDWARLNARQIIQLAEENQVDLIVLESLRGFRPPGYENLDQEKKRRVAFFAHGRIRRKVTEKAVERGMRVVTVPYLASSKVCAECRKKQKDNKQWEKNKKRGLFKCEGCGSQAQVDENAARVLGRVFWGEIELPTAIP

SEQ ID NO: 112 - protein, 870 aa, Artificial Sequence
  Description of Artificial Sequence: Synthetic polypeptide
MKVHEIPRSQLLKIKQYEGSFVEWYRDLQEDRKKFASLLFRWAAFGYAAREDDGATYISPSQALLERRLLLGDAEDVAIKFLDVLFKGGAPSSSCYSLFYEDFALRDKAKYSGAKREFIEGLATMPLDKIIERIRQDEQLSKIPAEEWLILGAEYSPEEIWEQVAPRIVNVDRSLGKQLRERLGIKCRRPHDAGYCKILMEVVARQLRSHNETYHEYLNQTHEMKTKVANNLTNEFDLVCEFAEVLEEKNYGLGWYVLWQGVKQALKEQKKPTKIQIAVDQLRQPKFAGLLTAKWRALKGAYDTWKLKKRLEKRKAFPYMPNWDNDYQIPVGLTGLGVFTLEVKRTEVVVDLKEHGKLFCSHSHYFGDLTAEKHPSRYHLKFRHKLKLRKRDSRVEPTIGPWIEAALREITIQKKPNGVFYLGLPYALSHGIDNFQIAKRFFSAAKPDKEVINGLPSEMVVGAADLNLSNIVAPVKARIGKGLEGPLHALDYGYGELIDGPKILTPDGPRCGELISLKRDIVEIKSAIKEFKACQREGLTMSEETTTWLSEVESPSDSPRCMIQSRIADTSRRLNSFKYQMNKEGYQDLAEALRLLDAMDSYNSLLESYQRMHLSPGEQSPKEAKFDTKRASFRDLLRRRVAHTIVEYFDDCDIVFFEDLDGPSDSDSRNNALVKLLSPRTLLLYIRQALEKRGIGMVEVAKDGTSQNNPISGHVGWRNKQNKSEIYFYEDKELLVMDADEVGAMNILCRGLNHSVCPYSFVTKAPEKKNDEKKEGDYGKRVKRFLKDRYGSSNVRFLVASMGFVTVTTKRPKDALVGKRLYYHGGELVTHDLHNRMKDEIKYLVEKEVLARRVSLSDSTIKSYKSFAHV

SEQ ID NO: 113 - protein, 1093 aa, Artificial Sequence
  Description of Artificial Sequence: Synthetic polypeptide
MSNKEKNASETRKAYTTKMIPRSHDRMKLLGNFMDYLMDGTPIFFELWNQFGGGIDRDIISGTANKDKISDDLLLAVNWFKVMPINSKPQGVSPSNLANLFQQYSGSEPDIQAQEYFASNFDTEKHQWKDMRVEYERLLAELQLSRSDMHHDLKLMYKEKCIGLSLSTAHYITSVMFGTGAKNNRQTKHQFYSKVIQLLEESTQINSVEQLASIILKAGDCDSYRKLRIRCSRKGATPSILKIVQDYELGTNHDDEVNVPSLIANLKEKLGRFEYECEWKCMEKIKAFLASKVGPYYLGSYSAMLENALSPIKGMTTKNCKFVLKQIDAKNDIKYENEPFGKIVEGFFDSPYFESDTNVKWVLHPHHIGESNIKTLWEDLNAIHSKYEEDIASLSEDKKEKRIKVYQGDVCQTINTYCEEVGKEAKTPLVQLLRYLYSRKDDIAVDKIIDGITFLSKKHKVEKQKINPVIQKYPSFNFGNNSKLLGKIISPKDKLKHNLKCNRNQVDNYIWIEIKVLNTKTMRWEKHHYALSSTRFLEEVYYPATSENPPDALAARFRTKTNGYEGKPALSAEQIEQIRSAPVGLRKVKKRQMRLEAARQQNLLPRYTWGKDFNINICKRGNNFEVTLATKVKKKKEKNYKVVLGYDANIVRKNTYAAIEAHANGDGVIDYNDLPVKPIESGFVTVESQVRDKSYDQLSYNGVKLLYCKPHVESRRSFLEKYRNGTMKDNRGNNIQIDFMKDFEAIADDETSLYYFNMKYCKLLQSSIRNHSSQAKEYREEIFELLRDGKLSVLKLSSLSNLSFVMFKVAKSLIGTYFGHLLKKPKNSKSDVKAPPITDEDKQKADPEMFALRLALEEKRLNKVKSKKEVIANKIVAKALELRDKYGPVLIKGENISDTTKKGKKSSTNSFLMDWLARGVANKVKEMVMMHQGLEFVEVNPNFTSHQDPFVHKNPENTFRARYSRCTPSELTEKNRKEILSFLSDKPSKRPTNAYYNEGAMAFLATYGLKKNDVLGVSLEKFKQIMANILHQRSEDQLLFPSRGGMFYLATYKLDADATSVNWNGKQFWVCNADLVAAYNVGLVDIQKDFKKK

SEQ ID NO: 114 - protein, 1054 aa, Artificial Sequence
  Description of Artificial Sequence: Synthetic polypeptide
MSSAIKSYKSVLRPNERKNQLLKSTIQCLEDGSAFFFKMLQGLFGGITPEIVRFSTEQEKQQQDIALWCAVNWFRPVSQDSLTHTIASDNLVEKFEEYYGGTASDAIKQYFSASIGESYYWNDCRQQYYDLCRELGVEVSDLTHDLEILCREKCLAVATESNQNNSIISVLFGTGEKEDRSVKLRITKKILEAISNLKEIPKNVAPIQEIILNVAKATKETFRQVYAGNLGAPSTLEKFIAKDGQKEFDLKKLQTDLKKVIRGKSKERDWCCQEELRSYVEQNTIQYDLWAWGEMFNKAHTALKIKSTRNYNFAKQRLEQFKEIQSLNNLLVVKKLNDFFDSEFFSGEETYTICVHHLGGKDLSKLYKAWEDDPADPENAIVVLCDDLKNNFKKEPIRNILRYIFTIRQECSAQDILAAAKYNQQLDRYKSQKANPSVLGNQGFTWTNAVILPEKAQRNDRPNSLDLRIWLYLKLRHPDGRWKKHHIPFYDTRFFQEIYAAGNSPVDTCQFRTPRFGYHLPKLTDQTAIRVNKKHVKAAKTEARIRLAIQQGTLPVSNLKITEISATINSKGQVRIPVKFDVGRQKGTLQIGDRFCGYDQNQTASHAYSLWEVVKEGQYHKELGCFVRFISSGDIVSITENRGNQFDQLSYEGLAYPQYADWRKKASKFVSLWQITKKNKKKEIVTVEAKEKFDAICKYQPRLYKFNKEYAYLLRDIVRGKSLVELQQIRQEIFRFIEQDCGVTRLGSLSLSTLETVKAVKGIIYSYFSTALNASKNNPISDEQRKEFDPELFALLEKLELIRTRKKKQKVERIANSLIQTCLENNIKFIRGEGDLSTTNNATKKKANSRSMDWLARGVFNKIRQLAPMHNITLFGCGSLYTSHQDPLVHRNPDKAMKCRWAAIPVKDIGDWVLRKLSQNLRAKNIGTGEYYHQGVKEFLSHYELQDLEEELLKWRSDRKSNIPCWVLQNRLAEKLGNKEAVVYIPVRGGRIYFATHKVATGAVSIVFDQKQVWVCNADHVAAANIALTVKGIGEQSSDEENPDGSRIKLQLTS

SEQ ID NO: 115 - DNA, 4092 bp, Artificial Sequence
  Description of Artificial Sequence: Synthetic polynucleotide
gccaccatggccccaaagaagaagcggaaggtcggtatccacggagtcccagcagccgccaccagatccttcatcctgaagatcgagcccaacgaggaagtgaagaaaggcctctggaaaacccacgaggtgctgaaccacggaatcgcctactacatgaatatcctgaagctgatccggcaagaggccatctacgagcaccacgagcaggaccccaagaatcccaagaaggtgtccaaggccgagatccaggccgagctgtgggatttcgtgctgaagatgcagaagtgcaacagcttcacacacgaggtggacaaggacgaggtgttcaacatcctgagagagctgtacgaggaactggtgcccagcagcgtggaaaagaagggcgaagccaaccagctgagcaacaagtttctgtaccctctggtggaccccaacagccagtctggaaagggaacagccagcagcggcagaaagcccagatggtacaacctgaagattgccggcgatcccggaggctctggaggaagctccgaagtcgagttttcccatgagtactggatgagacacgcattgactctcgcaaagagggctcgagatgaacgcgaggtgcccgtgggggcagtactcgtgctcaacaatcgcgtaatcggcgaaggttggaatagggcaatcggactccacgaccccactgcacatgcggaaatcatggcccttcgacagggagggcttgtgatgcagaattatcgactttatgatgcgacgctgtacgtcacgtttgaaccttgcgtaatgtgcgcgggagctatgattcactcccgcattggacgagttgtattcggtgttcgcaacgccaagacgggtgccgcaggttcactgatggacgtgctgcatcatccaggcatgaaccaccgggtagaaatcacagaaggcatattggcggacgaatgtgcggcgctgttgtgtcgtttttttcgcatgcccaggcgggtctttaacgcccagaaaaaagcacaatcctctactgacggctcttctggatctgaaacacctggcacaagcgagagcgccacccctgagagctctggctcctgggaagaagagaagaagaagtgggaagaagataagaaaaaggacccgctggccaagatcctgggcaagctggctgagtacggactgatccctctgttcatcccctacaccgacagcaacgagcccatcgtgaaagaaatcaagtggatggaaaagtcccggaaccagagcgtgcggcggctggataaggacatgttcattcaggccctggaacggttcctgagctgggagagctggaacctgaaagtgaaagaggaatacgagaaggtcgagaaagagtacaagaccctggaagagaggatcaaagaggacatccaggctctgaaggctctggaacagtatgagaaagagcggcaagaacagctgctgcgggacaccctgaacaccaacgagtaccggctgagcaagagaggccttagaggctggcgggaaatcatccagaaatggctgaaaatggacgagaacgagccctccgagaagtacctggaagtgttcaaggactaccagcggaagcaccctagagaggccggcgattacagcgtgtacgagttcctgtccaagaaagagaaccacttcatctggcggaatcaccctgagtacccctacctgtacgccaccttctgcgagatcgacaagaaaaagaaggacgccaagcagcaggccaccttcacactggccgatcctatcaatcaccctctgtgggtccgattcgaggaaagaagcggcagcaacctgaacaagtacagaatcctgaccgagcagctgcacaccgagaagctgaagaaaaagctgacagtgcagctggaccggctgatctaccctacagaatctggcggctgggaagagaagggcaaagtggacattgtgctgctgcccagccggcagttctacaaccagatcttcctggacatcgaggaaaagggcaagcacgccttcacctacaaggatgagagcatcaagttccctctgaagggcacactcggcggagccagagtgcagttcgacagagatcacctgagaagataccctcacaaggtggaaagcggcaacgtgggcagaatctacttcaacatgaccgtgaacatcgagcctacagagtccccagtgtccaagtctctgaagatccaccgggacgacttccccaaggtggtcaacttcaagcccaaagaactgaccgagtggatcaaggacagcaagggcaagaaactgaagtccggcatcgagtccctggaaatcggcctgagagtgatgagcatcgacctgggacagagacaggccgctgccgcctctattttcgaggtggtggatcagaagcccgacatcgaaggcaagctgtttttcccaatcaagggcaccgagctgtatgccgtgcacagagccagcttcaacatcaagctgcccggcgagacactggtcaagagcagagaagtgctgcggaaggccagagaggacaatctgaaactgatgaaccagaagctcaacttcctgcggaacgtgctgcacttccagcagttcgaggacatcaccgagagagagaagcgggtcaccaagtggatcagcagacaagagaacagcgacgtgcccctggtgtaccaggatgagctgatccagatccgcgagctgatgtacaagccttacaaggactgggtcgccttcctgaagcagctccacaagagactggaagtcgagatcggcaaagaagtgaagcactggcggaagtccctgagcgacggaagaaagggcctgtacggcatctccctgaagaacatcgacgagatcgatcggacccggaagttcctgctgagatggtccctgaggcctaccgaacctggcgaagtgcgtagactggaacccggccagagattcgccatcgaccagctgaatcacctgaacgccctgaaagaagatcggctgaagaagatggccaacaccatcatcatgcacgccctgggctactgctacgacgtgcggaagaagaaatggcaggctaagaaccccgcctgccagatcatcctgttcgaggatctgagcaactacaacccctacgaggaaaggtcccgcttcgagaacagcaagctcatgaagtggtccagacgcgagatccccagacaggttgcactgcagggcgagatctatggcctgcaagtgggagaagtgggcgctcagttcagcagcagattccacgccaagacaggcagccctggcatcagatgtagcgtcgtgaccaaagagaagctgcaggacaatcggttcttcaagaatctgcagagagagggcagactgaccctggacaaaatcgccgtgctgaaagagggcgatctgtacccagacaaaggcggcgagaagttcatcagcctgagcaaggatcggaagtgcgtgaccacacacgccgacatcaacgccgctcagaacctgcagaagcggttctggacaagaacccacggcttctacaaggtgtactgcaaggcctaccaggtggacggccagaccgtgtacatccctgagagcaaggaccagaagcagaagatcatcgaagagttcggcgagggctacttcattctgaaggacggggtgtacgaatgggtcaacgccggcaagctgaaaatcaagaagggcagctccaagcagagcagcagcgagctggtggatagcgacatcctgaaagacagcttcgacctggcctccgagctgaaaggcgaaaagctgatgctgtacagggaccccagcggcaatgtgttccccagcgacaaatggatggccgctggcgtgttcttcggaaagctggaacgcatcctgatcagcaagctgaccaaccagtactccatcagcaccatcgaggacgacagcagcaagcagtctatgaaaaggccggcggccacgaaaaaggccggccaggcaaaaaagaaaaagggatcctacccatacgatgttccagattacgcttatccctacgacgtgcctgattatgcatacccatatgatgtccccgactatgcctaa

SEQ ID NO: 116 - protein, 1361 aa, Artificial Sequence
  Description of Artificial Sequence: Synthetic polypeptide
MAPKKKRKVGIHGVPAAATRSFILKIEPNEEVKKGLWKTHEVLNHGIAYYMNILKLIRQEAIYEHHEQDPKNPKKVSKAEIQAELWDFVLKMQKCNSFTHEVDKDEVFNILRELYEELVPSSVEKKGEANQLSNKFLYPLVDPNSQSGKGTASSGRKPRWYNLKIAGDPGGSGGSSEVEFSHEYWMRHALTLAKRARDEREVPVGAVLVLNNRVIGEGWNRAIGLHDPTAHAEIMALRQGGLVMQNYRLYDATLYVTFEPCVMCAGAMIHSRIGRVVFGVRNAKTGAAGSLMDVLHHPGMNHRVEITEGILADECAALLCRFFRMPRRVFNAQKKAQSSTDGSSGSETPGTSESATPESSGSWEEEKKKWEEDKKKDPLAKILGKLAEYGLIPLFIPYTDSNEPIVKEIKWMEKSRNQSVRRLDKDMFIQALERFLSWESWNLKVKEEYEKVEKEYKTLEERIKEDIQALKALEQYEKERQEQLLRDTLNTNEYRLSKRGLRGWREIIQKWLKMDENEPSEKYLEVFKDYQRKHPREAGDYSVYEFLSKKENHFIWRNHPEYPYLYATFCEIDKKKKDAKQQATFTLADPINHPLWVRFEERSGSNLNKYRILTEQLHTEKLKKKLTVQLDRLIYPTESGGWEEKGKVDIVLLPSRQFYNQIFLDIEEKGKHAFTYKDESIKFPLKGTLGGARVQFDRDHLRRYPHKVESGNVGRIYFNMTVNIEPTESPVSKSLKIHRDDFPKVVNFKPKELTEWIKDSKGKKLKSGIESLEIGLRVMSIDLGQRQAAAASIFEVVDQKPDIEGKLFFPIKGTELYAVHRASFNIKLPGETLVKSREVLRKAREDNLKLMNQKLNFLRNVLHFQQFEDITEREKRVTKWISRQENSDVPLVYQDELIQIRELMYKPYKDWVAFLKQLHKRLEVEIGKEVKHWRKSLSDGRKGLYGISLKNIDEIDRTRKFLLRWSLRPTEPGEVRRLEPGQRFAIDQLNHLNALKEDRLKKMANTIIMHALGYCYDVRKKKWQAKNPACQIILFEDLSNYNPYEERSRFENSKLMKWSRREIPRQVALQGEIYGLQVGEVGAQFSSRFHAKTGSPGIRCSVVTKEKLQDNRFFKNLQREGRLTLDKIAVLKEGDLYPDKGGEKFISLSKDRKCVTTHADINAAQNLQKRFWTRTHGFYKVYCKAYQVDGQTVYIPESKDQKQKIIEEFGEGYFILKDGVYEWVNAGKLKIKKGSSKQSSSELVDSDILKDSFDLASELKGEKLMLYRDPSGNVFPSDKWMAAGVFFGKLERILISKLTNQYSISTIEDDSSKQSMKRPAATKKAGQAKKKKGSYPYDVPDYAYPYDVPDYAYPYDVPDYA

SEQ ID NO: 117 - DNA, 4092 bp, Artificial Sequence
  Description of Artificial Sequence: Synthetic polynucleotide
gccaccatggccccaaagaagaagcggaaggtcggtatccacggagtcccagcagccgccaccagatccttcatcctgaagatcgagcccaacgaggaagtgaagaaaggcctctggaaaacccacgaggtgctgaaccacggaatcgcctactacatgaatatcctgaagctgatccggcaagaggccatctacgagcaccacgagcaggaccccaagaatcccaagaaggtgtccaaggccgagatccaggccgagctgtgggatttcgtgctgaagatgcagaagtgcaacagcttcacacacgaggtggacaaggacgaggtgttcaacatcctgagagagctgtacgaggaactggtgcccagcagcgtggaaaagaagggcgaagccaaccagctgagcaacaagtttctgtaccctctggtggaccccaacagccagtctggaaagggaacagccagcagcggcagaaagcccagatggtacaacctgaagattgccggcgatccctcctgggaagaagagaagaagaagtgggaagaagataagaaaaaggacccgctggccaagatcctgggcaagctggctgagtacggactgatccctctgttcatcccctacaccgacagcaacgagcccatcgtgaaagaaatcaagtggatggaaaagtcccggaaccagagcgtgcggcggctggataaggacatgttcattcaggccctggaacggttcctgagctgggagagctggaacctgaaagtgaaagaggaatacgagaaggtcgagaaagagtacaagaccctggaagagaggatcaaaggaggctctggaggaagctccgaagtcgagttttcccatgagtactggatgagacacgcattgactctcgcaaagagggctcgagatgaacgcgaggtgcccgtgggggcagtactcgtgctcaacaatcgcgtaatcggcgaaggttggaatagggcaatcggactccacgaccccactgcacatgcggaaatcatggcccttcgacagggagggcttgtgatgcagaattatcgactttatgatgcgacgctgtacgtcacgtttgaaccttgcgtaatgtgcgcgggagctatgattcactcccgcattggacgagttgtattcggtgttcgcaacgccaagacgggtgccgcaggttcactgatggacgtgctgcatcatccaggcatgaaccaccgggtagaaatcacagaaggcatattggcggacgaatgtgcggcgctgttgtgtcgtttttttcgcatgcccaggcgggtctttaacgcccagaaaaaagcacaatcctctactgacggctcttctggatctgaaacacctggcacaagcgagagcgccacccctgagagctctggcgaggacatccaggctctgaaggctctggaacagtatgagaaagagcggcaagaacagctgctgcgggacaccctgaacaccaacgagtaccggctgagcaagagaggccttagaggctggcgggaaatcatccagaaatggctgaaaatggacgagaacgagccctccgagaagtacctggaagtgttcaaggactaccagcggaagcaccctagagaggccggcgattacagcgtgtacgagttcctgtccaagaaagagaaccacttcatctggcggaatcaccctgagtacccctacctgtacgccaccttctgcgagatcgacaagaaaaagaaggacgccaagcagcaggccaccttcacactggccgatcctatcaatcaccctctgtgggtccgattcgaggaaagaagcggcagcaacctgaacaagtacagaatcctgaccgagcagctgcacaccgagaagctgaagaaaaagctgacagtgcagctggaccggctgatctaccctacagaatctggcggctgggaagagaagggcaaagtggacattgtgctgctgcccagccggcagttctacaaccagatcttcctggacatcgaggaaaagggcaagcacgccttcacctacaaggatgagagcatcaagttccctctgaagggcacactcggcggagccagagtgcagttcgacagagatcacctgagaagataccctcacaaggtggaaagcggcaacgtgggcagaatctacttcaacatgaccgtgaacatcgagcctacagagtccccagtgtccaagtctctgaagatccaccgggacgacttccccaaggtggtcaacttcaagcccaaagaactgaccgagtggatcaaggacagcaagggcaagaaactgaagtccggcatcgagtccctggaaatcggcctgagagtgatgagcatcgacctgggacagagacaggccgctgccgcctctattttcgaggtggtggatcagaagcccgacatcgaaggcaagctgtttttcccaatcaagggcaccgagctgtatgccgtgcacagagccagcttcaacatcaagctgcccggcgagacactggtcaagagcagagaagtgctgcggaaggccagagaggacaatctgaaactgatgaaccagaagctcaacttcctgcggaacgtgctgcacttccagcagttcgaggacatcaccgagagagagaagcgggtcaccaagtggatcagcagacaagagaacagcgacgtgcccctggtgtaccaggatgagctgatccagatccgcgagctgatgtacaagccttacaaggactgggtcgccttcctgaagcagctccacaagagactggaagtcgagatcggcaaagaagtgaagcactggcggaagtccctgagcgacggaagaaagggcctgtacggcatctccctgaagaacatcgacgagatcgatcggacccggaagttcctgctgagatggtccctgaggcctaccgaacctggcgaagtgcgtagactggaacccggccagagattcgccatcgaccagctgaatcacctgaacgccctgaaagaagatcggctgaagaagatggccaacaccatcatcatgcacgccctgggctactgctacgacgtgcggaagaagaaatggcaggctaagaaccccgcctgccagatcatcctgttcgaggatctgagcaactacaacccctacgaggaaaggtcccgcttcgagaacagcaagctcatgaagtggtccagacgcgagatccccagacaggttgcactgcagggcgagatctatggcctgcaagtgggagaagtgggcgctcagttcagcagcagattccacgccaagacaggcagccctggcatcagatgtagcgtcgtgaccaaagagaagctgcaggacaatcggttcttcaagaatctgcagagagagggcagactgaccctggacaaaatcgccgtgctgaaagagggcgatctgtacccagacaaaggcggcgagaagttcatcagcctgagcaaggatcggaagtgcgtgaccacacacgccgacatcaacgccgctcagaacctgcagaagcggttctggacaagaacccacggcttctacaaggtgtactgcaaggcctaccaggtggacggccagaccgtgtacatccctgagagcaaggaccagaagcagaagatcatcgaagagttcggcgagggctacttcattctgaaggacggggtgtacgaatgggtcaacgccggcaagctgaaaatcaagaagggcagctccaagcagagcagcagcgagctggtggatagcgacatcctgaaagacagcttcgacctggcctccgagctgaaaggcgaaaagctgatgctgtacagggaccccagcggcaatgtgttccccagcgacaaatggatggccgctggcgtgttcttcggaaagctggaacgcatcctgatcagcaagctgaccaaccagtactccatcagcaccatcgaggacgacagcagcaagcagtctatgaaaaggccggcggccacgaaaaaggccggccaggcaaaaaagaaaaagggatcctacccatacgatgttccagattacgcttatccctacgacgtgcctgattatgcatacccatatgatgtccccgactatgcctaa

SEQ ID NO: 118 - protein, 1361 aa, Artificial Sequence
  Description of Artificial Sequence: Synthetic polypeptide
MAPKKKRKVGIHGVPAAATRSFILKIEPNEEVKKGLWKTHEVLNHGIAYYMNILKLIRQEAIYEHHEQDPKNPKKVSKAEIQAELWDFVLKMQKCNSFTHEVDKDEVFNILRELYEELVPSSVEKKGEANQLSNKFLYPLVDPNSQSGKGTASSGRKPRWYNLKIAGDPSWEEEKKKWEEDKKKDPLAKILGKLAEYGLIPLFIPYTDSNEPIVKEIKWMEKSRNQSVRRLDKDMFIQALERFLSWESWNLKVKEEYEKVEKEYKTLEERIKGGSGGSSEVEFSHEYWMRHALTLAKRARDEREVPVGAVLVLNNRVIGEGWNRAIGLHDPTAHAEIMALRQGGLVMQNYRLYDATLYVTFEPCVMCAGAMIHSRIGRVVFGVRNAKTGAAGSLMDVLHHPGMNHRVEITEGILADECAALLCRFFRMPRRVFNAQKKAQSSTDGSSGSETPGTSESATPESSGEDIQALKALEQYEKERQEQLLRDTLNTNEYRLSKRGLRGWREIIQKWLKMDENEPSEKYLEVFKDYQRKHPREAGDYSVYEFLSKKENHFIWRNHPEYPYLYATFCEIDKKKKDAKQQATFTLADPINHPLWVRFEERSGSNLNKYRILTEQLHTEKLKKKLTVQLDRLIYPTESGGWEEKGKVDIVLLPSRQFYNQIFLDIEEKGKHAFTYKDESIKFPLKGTLGGARVQFDRDHLRRYPHKVESGNVGRIYFNMTVNIEPTESPVSKSLKIHRDDFPKVVNFKPKELTEWIKDSKGKKLKSGIESLEIGLRVMSIDLGQRQAAAASIFEVVDQKPDIEGKLFFPIKGTELYAVHRASFNIKLPGETLVKSREVLRKAREDNLKLMNQKLNFLRNVLHFQQFEDITEREKRVTKWISRQENSDVPLVYQDELIQIRELMYKPYKDWVAFLKQLHKRLEVEIGKEVKHWRKSLSDGRKGLYGISLKNIDEIDRTRKFLLRWSLRPTEPGEVRRLEPGQRFAIDQLNHLNALKEDRLKKMANTIIMHALGYCYDVRKKKWQAKNPACQIILFEDLSNYNPYEERSRFENSKLMKWSRREIPRQVALQGEIYGLQVGEVGAQFSSRFHAKTGSPGIRCSVVTKEKLQDNRFFKNLQREGRLTLDKIAVLKEGDLYPDKGGEKFISLSKDRKCVTTHADINAAQNLQKRFWTRTHGFYKVYCKAYQVDGQTVYIPESKDQKQKIIEEFGEGYFILKDGVYEWVNAGKLKIKKGSSKQSSSELVDSDILKDSFDLASELKGEKLMLYRDPSGNVFPSDKWMAAGVFFGKLERILISKLTNQYSISTIEDDSSKQSMKRPAATKKAGQAKKKKGSYPYDVPDYAYPYDVPDYAYPYDVPDYA

SEQ ID NO: 119 - DNA, 4092 bp, Artificial Sequence
  Description of Artificial Sequence: Synthetic polynucleotide
gccaccatggccccaaagaagaagcggaaggtcggtatccacggagtcccagcagccgccaccagatccttcatcctgaagatcgagcccaacgaggaagtgaagaaaggcctctggaaaacccacgaggtgctgaaccacggaatcgcctactacatgaatatcctgaagctgatccggcaagaggccatctacgagcaccacgagcaggaccccaagaatcccaagaaggtgtccaaggccgagatccaggccgagctgtgggatttcgtgctgaagatgcagaagtgcaacagcttcacacacgaggtggacaaggacgaggtgttcaacatcctgagagagctgtacgaggaactggtgcccagcagcgtggaaaagaagggcgaagccaaccagctgagcaacaagtttctgtaccctctggtggaccccaacagccagtctggaaagggaacagccagcagcggcagaaagcccagatggtacaacctgaagattgccggcgatccctcctgggaagaagagaagaagaagtgggaagaagataagaaaaaggacccgctggccaagatcctgggcaagctggctgagtacggactgatccctctgttcatcccctacaccgacagcaacgagcccatcgtgaaagaaatcaagtggatggaaaagtcccggaaccagagcgtgcggcggctggataaggacatgttcattcaggccctggaacggttcctgagctgggagagctggaacctgaaagtgaaagaggaatacgagaaggtcgagaaagagtacaagaccctggaagagaggatcaaagaggacatccaggctctgaaggctctggaacagtatgagaaagagcggcaagaacagctgctgcgggacaccctgaacaccaacgagtaccggctgagcaagagaggccttagaggctggcgggaaatcatccagaaatggctgaaaatggacggaggctctggaggaagctccgaagtcgagttttcccatgagtactggatgagacacgcattgactctcgcaaagagggctcgagatgaacgcgaggtgcccgtgggggcagtactcgtgctcaacaatcgcgtaatcggcgaaggttggaatagggcaatcggactccacgaccccactgcacatgcggaaatcatggcccttcgacagggagggcttgtgatgcagaattatcgactttatgatgcgacgctgtacgtcacgtttgaaccttgcgtaatgtgcgcgggagctatgattcactcccgcattggacgagttgtattcggtgttcgcaacgccaagacgggtgccgcaggttcactgatggacgtgctgcatcatccaggcatgaaccaccgggtagaaatcacagaaggcatattggcggacgaatgtgcggcgctgttgtgtcgtttttttcgcatgcccaggcgggtctttaacgcccagaaaaaagcacaatcctctactgacggctcttctggatctgaaacacctggcacaagcgagagcgccacccctgagagctctggcgagaacgagccctccgagaagtacctggaagtgttcaaggactaccagcggaagcaccctagagaggccggcgattacagcgtgtacgagttcctgtccaagaaagagaaccacttcatctggcggaatcaccctgagtacccctacctgtacgccaccttctgcgagatcgacaagaaaaagaaggacgccaagcagcaggccaccttcacactggccgatcctatcaatcaccctctgtgggtccgattcgaggaaagaagcggcagcaacctgaacaagtacagaatcctgaccgagcagctgcacaccgagaagctgaagaaaaagctgacagtgcagctggaccggctgatctaccctacagaatctggcggctgggaagagaagggcaaagtggacattgtgctgctgcccagccggcagttctacaaccagatcttcctggacatcgaggaaaagggcaagcacgccttcacctacaaggatgagagcatcaagttccctctgaagggcacactcggcggagccagagtgcagttcgacagagatcacctgagaagataccctcacaaggtggaaagcggcaacgtgggcagaatctacttcaacatgaccgtgaacatcgagcctacagagtccccagtgtccaagtctctgaagatccaccgggacgacttccccaaggtggtcaacttcaagcccaaagaactgaccgagtggatcaaggacagcaagggcaagaaactgaagtccggcatcgagtccctggaaatcggcctgagagtgatgagcatcgacctgggacagagacaggccgctgccgcctctattttcgaggtggtggatcagaagcccgacatcgaaggcaagctgtttttcccaatcaagggcaccgagctgtatgccgtgcacagagccagcttcaacatcaagctgcccggcgagacactggtcaagagcagagaagtgctgcggaaggccagagaggacaatctgaaactgatgaaccagaagctcaacttcctgcggaacgtgctgcacttccagcagttcgaggacatcaccgagagagagaagcgggtcaccaagtggatcagcagacaagagaacagcgacgtgcccctggtgtaccaggatgagctgatccagatccgcgagctgatgtacaagccttacaaggactgggtcgccttcctgaagcagctccacaagagactggaagtcgagatcggcaaagaagtgaagcactggcggaagtccctgagcgacggaagaaagggcctgtacggcatctccctgaagaacatcgacgagatcgatcggacccggaagttcctgctgagatggtccctgaggcctaccgaacctggcgaagtgcgtagactggaacccggccagagattcgccatcgaccagctgaatcacctgaacgccctgaaagaagatcggctgaagaagatggccaacaccatcatcatgcacgccctgggctactgctacgacgtgcggaagaagaaatggcaggctaagaaccccgcctgccagatcatcctgttcgaggatctgagcaactacaacccctacgaggaaaggtcccgcttcgagaacagcaagctcatgaagtggtccagacgcgagatccccagacaggttgcactgcagggcgagatctatggcctgcaagtgggagaagtgggcgctcagttcagcagcagattccacgccaagacaggcagccctggcatcagatgtagcgtcgtgaccaaagagaagctgcaggacaatcggttcttcaagaatctgcagagagagggcagactgaccctggacaaaatcgccgtgctgaaagagggcgatctgtacccagacaaaggcggcgagaagttcatcagcctgagcaaggatcggaagtgcgtgaccacacacgccgacatcaacgccgctcagaacctgcagaagcggttctggacaagaacccacggcttctacaaggtgtactgcaaggcctaccaggtggacggccagaccgtgtacatccctgagagcaaggaccagaagcagaagatcatcgaagagttcggcgagggctacttcattctgaaggacggggtgtacgaatgggtcaacgccggcaagctgaaaatcaagaagggcagctccaagcagagcagcagcgagctggtggatagcgacatcctgaaagacagcttcgacctggcctccgagctgaaaggcgaaaagctgatgctgtacagggaccccagcggcaatgtgttccccagcgacaaatggatggccgctggcgtgttcttcggaaagctggaacgcatcctgatcagcaagctgaccaaccagtactccatcagcaccatcgaggacgacagcagcaagcagtctatgaaaaggccggcggccacgaaaaaggccggccaggcaaaaaagaaaaagggatcctacccatacgatgttccagattacgcttatccctacgacgtgcctgattatgcatacccatatgatgtccccgactatgcctaa

SEQ ID NO: 120 - protein, 1361 aa, Artificial Sequence
  Description of Artificial Sequence: Synthetic polypeptide
MAPKKKRKVGIHGVPAAATRSFILKIEPNEEVKKGLWKTHEVLNHGIAYYMNILKLIRQEAIYEHHEQDPKNPKKVSKAEIQAELWDFVLKMQKCNSFTHEVDKDEVFNILRELYEELVPSSVEKKGEANQLSNKFLYPLVDPNSQSGKGTASSGRKPRWYNLKIAGDPSWEEEKKKWEEDKKKDPLAKILGKLAEYGLIPLFIPYTDSNEPIVKEIKWMEKSRNQSVRRLDKDMFIQALERFLSWESWNLKVKEEYEKVEKEYKTLEERIKEDIQALKALEQYEKERQEQLLRDTLNTNEYRLSKRGLRGWREIIQKWLKMDGGSGGSSEVEFSHEYWMRHALTLAKRARDEREVPVGAVLVLNNRVIGEGWNRAIGLHDPTAHAEIMALRQGGLVMQNYRLYDATLYVTFEPCVMCAGAMIHSRIGRVVFGVRNAKTGAAGSLMDVLHHPGMNHRVEITEGILADECAALLCRFFRMPRRVFNAQKKAQSSTDGSSGSETPGTSESATPESSGENEPSEKYLEVFKDYQRKHPREAGDYSVYEFLSKKENHFIWRNHPEYPYLYATFCEIDKKKKDAKQQATFTLADPINHPLWVRFEERSGSNLNKYRILTEQLHTEKLKKKLTVQLDRLIYPTESGGWEEKGKVDIVLLPSRQFYNQIFLDIEEKGKHAFTYKDESIKFPLKGTLGGARVQFDRDHLRRYPHKVESGNVGRIYFNMTVNIEPTESPVSKSLKIHRDDFPKVVNFKPKELTEWIKDSKGKKLKSGIESLEIGLRVMSIDLGQRQAAAASIFEVVDQKPDIEGKLFFPIKGTELYAVHRASFNIKLPGETLVKSREVLRKAREDNLKLMNQKLNFLRNVLHFQQFEDITEREKRVTKWISRQENSDVPLVYQDELIQIRELMYKPYKDWVAFLKQLHKRLEVEIGKEVKHWRKSLSDGRKGLYGISLKNIDEIDRTRKFLLRWSLRPTEPGEVRRLEPGQRFAIDQLNHLNALKEDRLKKMANTIIMHALGYCYDVRKKKWQAKNPACQIILFEDLSNYNPYEERSRFENSKLMKWSRREIPRQVALQGEIYGLQVGEVGAQFSSRFHAKTGSPGIRCSVVTKEKLQDNRFFKNLQREGRLTLDKIAVLKEGDLYPDKGGEKFISLSKDRKCVTTHADINAAQNLQKRFWTRTHGFYKVYCKAYQVDGQTVYIPESKDQKQKIIEEFGEGYFILKDGVYEWVNAGKLKIKKGSSKQSSSELVDSDILKDSFDLASELKGEKLMLYRDPSGNVFPSDKWMAAGVFFGKLERILISKLTNQYSISTIEDDSSKQSMKRPAATKKAGQAKKKKGSYPYDVPDYAYPYDVPDYAYPYDVPDYA

SEQ ID NO: 121 - DNA, 4092 bp, Artificial Sequence
  Description of Artificial Sequence: Synthetic polynucleotide
gccaccatggccccaaagaagaagcggaaggtcggtatccacggagtcccagcagccgccaccagatccttcatcctgaagatcgagcccaacgaggaagtgaagaaaggcctctggaaaacccacgaggtgctgaaccacggaatcgcctactacatgaatatcctgaagctgatccggcaagaggccatctacgagcaccacgagcaggaccccaagaatcccaagaaggtgtccaaggccgagatccaggccgagctgtgggatttcgtgctgaagatgcagaagtgcaacagcttcacacacgaggtggacaaggacgaggtgttcaacatcctgagagagctgtacgaggaactggtgcccagcagcgtggaaaagaagggcgaagccaaccagctgagcaacaagtttctgtaccctctggtggaccccaacagccagtctggaaagggaacagccagcagcggcagaaagcccagatggtacaacctgaagattgccggcgatccctcctgggaagaagagaagaagaagtgggaagaagataagaaaaaggacccgctggccaagatcctgggcaagctggctgagtacggactgatccctctgttcatcccctacaccgacagcaacgagcccatcgtgaaagaaatcaagtggatggaaaagtcccggaaccagagcgtgcggcggctggataaggacatgttcattcaggccctggaacggttcctgagctgggagagctggaacctgaaagtgaaagaggaatacgagaaggtcgagaaagagtacaagaccctggaagagaggatcaaagaggacatccaggctctgaaggctctggaacagtatgagaaagagcggcaagaacagctgctgcgggacaccctgaacaccaacgagtaccggctgagcaagagaggccttagaggctggcgggaaatcatccagaaatggctgaaaatggacgagaacgagccctccgagaagtacctggaagtgttcaaggactaccagcggaagcaccctagagaggccggcgattacagcgtgtacgagttcctgtccaagaaagagaaccacttcatctggcggaatcaccctgagtacccctacctgtacgccaccttctgcgagatcgacaagaaaaagaaggacgccaagcagcaggccaccttcacactggccgatcctatcaatcaccctctgtgggtccgattcgaggaaagaagcggcagcaacctgaacaagtacagaatcctgaccgagcagctgcacaccgagaagctgaagaaaaagctgacagtgcagctggaccggctgatctaccctacagaatctggcggctgggaagagaagggcaaagtggacattgtgctgctgcccagccggcagttctacaaccagatcttcctggacatcgaggaaaagggcaagcacgccttcacctacaaggatgagagcatcaagttccctctgaagggcacactcggcggagccagagtgcagttcgacagagatcacctgagaagataccctcacaaggtggaaagcggcaacgtgggcagaatctacttcaacatgaccgtgaacatcgagcctacagagtccccagtgtccaagtctctgaagatccaccgggacgacttccccaaggtggtcaacttcaagcccaaagaactgaccgagtggatcaaggacagcaagggcaagaaactgaagtccggcatcgagtccctggaaatcggcctgagagtgatgagcatcgacctgggacagagacaggccgctgccgcctctattttcgaggtggtggatcagaagcccgacatcgaaggcaagctgtttttcccaatcaagggcaccgagctgtatgccgtgcacagagccagcttcaacatcaagctgcccggcgagacactggtcaagagcagagaagtgctgcggaaggccagagaggacaatctgaaactgatgaaccagaagctcaacttcctgcggaacgtgctgcacttccagcagttcgaggacatcaccgagagagagaagcgggtcaccaagtggatcagcagacaagagaacagcgacgtgcccctggtgtaccaggatgagctgatccagatccgcgagctgatgtacaagccttacaaggactgggtcgccttcctgaagcagctccacaagagactggaagtcgagatcggcaaagaagtgaagcactggcggaagtccctgagcgacggaagaaagggcctgtacggcatctccctgaagaacatcgacgagatcgatcggacccggaagttcctgctgagatggtccctgaggcctaccgaacctggcgaagtgcgtagactggaacccggccagagattcgccatcgaccagctgaatcacctgaacgccctgaaagaagatcggctgaagaagatggccaacaccatcatcatgcacgccctgggctactgctacgacgtgcggaagaagaaatggcaggctaagaaccccgcctgccagatcatcctgttcgaggatctgagcaactacaacccctacgaggaaaggtcccgcttcgagaacagcaagctcatgaagtggtccagacgcgagatccccagacaggttgcactgcagggcgagatctatggcctgcaagtgggagaagtgggcgctcagttcagcagcagattccacgccaagacaggcagccctggcatcagatgtagcgtcgtgaccaaagagaagctgcaggacaatcggttcttcaagaatctgcagagagagggcagactgaccctggacaaaatcgccgtgctgaaagagggcgatctgtacccagacaaaggcggcgagaagttcatcagcctgagcaaggatcggaagtgcgtgaccacacacgccgacatcaacgccgctcagaacctgcagaagcggttctggacaagaacccacggcttctacaaggtgtactgcaaggcctaccaggtggacggaggctctggaggaagctccgaagtcgagttttcccatgagtactggatgagacacgcattgactctcgcaaagagggctcgagatgaacgcgaggtgcccgtgggggcagtactcgtgctcaacaatcgcgtaatcggcgaaggttggaatagggcaatcggactccacgaccccactgcacatgcggaaatcatggcccttcgacagggagggcttgtgatgcagaattatcgactttatgatgcgacgctgtacgtcacgtttgaaccttgcgtaatgtgcgcgggagctatgattcactcccgcattggacgagttgtattcggtgttcgcaacgccaagacgggtgccgcaggttcactgatggacgtgctgcatcatccaggcatgaaccaccgggtagaaatcacagaaggcatattggcggacgaatgtgcggcgctgttgtgtcgtttttttcgcatgcccaggcgggtctttaacgcccagaaaaaagcacaatcctctactgacggctcttctggatctgaaacacctggcacaagcgagagcgccacccctgagagctctggcggccagaccgtgtacatccctgagagcaaggaccagaagcagaagatcatcgaagagttcggcgagggctacttcattctgaaggacggggtgtacgaatgggtcaacgccggcaagctgaaaatcaagaagggcagctccaagcagagcagcagcgagctggtggatagcgacatcctgaaagacagcttcgacctggcctccgagctgaaaggcgaaaagctgatgctgtacagggaccccagcggcaatgtgttccccagcgacaaatggatggccgctggcgtgttcttcggaaagctggaacgcatcctgatcagcaagctgaccaaccagtactccatcagcaccatcgaggacgacagcagcaagcagtctatgaaaaggccggcggccacgaaaaaggccggccaggcaaaaaagaaaaagggatcctacccatacgatgttccagattacgcttatccctacgacgtgcctgattatgcatacccatatgatgtccccgactatgcctaa

SEQ ID NO: 122 - protein, 1361 aa, Artificial Sequence
  Description of Artificial Sequence: Synthetic polypeptide
MAPKKKRKVGIHGVPAAATRSFILKIEPNEEVKKGLWKTHEVLNHGIAYYMNILKLIRQEAIYEHHEQDPKNPKKVSKAEIQAELWDFVLKMQKCNSFTHEVDKDEVFNILRELYEELVPSSVEKKGEANQLSNKFLYPLVDPNSQSGKGTASSGRKPRWYNLKIAGDPSWEEEKKKWEEDKKKDPLAKILGKLAEYGLIPLFIPYTDSNEPIVKEIKWMEKSRNQSVRRLDKDMFIQALERFLSWESWNLKVKEEYEKVEKEYKTLEERIKEDIQALKALEQYEKERQEQLLRDTLNTNEYRLSKRGLRGWREIIQKWLKMDENEPSEKYLEVFKDYQRKHPREAGDYSVYEFLSKKENHFIWRNHPEYPYLYATFCEIDKKKKDAKQQATFTLADPINHPLWVRFEERSGSNLNKYRILTEQLHTEKLKKKLTVQLDRLIYPTESGGWEEKGKVDIVLLPSRQFYNQIFLDIEEKGKHAFTYKDESIKFPLKGTLGGARVQFDRDHLRRYPHKVESGNVGRIYFNMTVNIEPTESPVSKSLKIHRDDFPKVVNFKPKELTEWIKDSKGKKLKSGIESLEIGLRVMSIDLGQRQAAAASIFEVVDQKPDIEGKLFFPIKGTELYAVHRASFNIKLPGETLVKSREVLRKAREDNLKLMNQKLNFLRNVLHFQQFEDITEREKRVTKWISRQENSDVPLVYQDELIQIRELMYKPYKDWVAFLKQLHKRLEVEIGKEVKHWRKSLSDGRKGLYGISLKNIDEIDRTRKFLLRWSLRPTEPGEVRRLEPGQRFAIDQLNHLNALKEDRLKKMANTIIMHALGYCYDVRKKKWQAKNPACQIILFEDLSNYNPYEERSRFENSKLMKWSRREIPRQVALQGEIYGLQVGEVGAQFSSRFHAKTGSPGIRCSVVTKEKLQDNRFFKNLQREGRLTLDKIAVLKEGDLYPDKGGEKFISLSKDRKCVTTHADINAAQNLQKRFWTRTHGFYKVYCKAYQVDGGSGGSSEVEFSHEYWMRHALTLAKRARDEREVPVGAVLVLNNRVIGEGWNRAIGLHDPTAHAEIMALRQGGLVMQNYRLYDATLYVTFEPCVMCAGAMIHSRIGRVVFGVRNAKTGAAGSLMDVLHHPGMNHRVEITEGILADECAALLCRFFRMPRRVFNAQKKAQSSTDGSSGSETPGTSESATPESSGGQTVYIPESKDQKQKIIEEFGEGYFILKDGVYEWVNAGKLKIKKGSSKQSSSELVDSDILKDSFDLASELKGEKLMLYRDPSGNVFPSDKWMAAGVFFGKLERILISKLTNQYSISTIEDDSSKQSMKRPAATKKAGQAKKKKGSYPYDVPDYAYPYDVPDYAYPYDVPDYA

SEQ ID NO: 123 - DNA, 4092 bp, Artificial Sequence
  Description of Artificial Sequence: Synthetic polynucleotide
gccaccatggccccaaagaagaagcggaaggtcggtatccacggagtcccagcagccgccaccagatccttcatcctgaagatcgagcccaacgaggaagtgaagaaaggcctctggaaaacccacgaggtgctgaaccacggaatcgcctactacatgaatatcctgaagctgatccggcaagaggccatctacgagcaccacgagcaggaccccaagaatcccaagaaggtgtccaaggccgagatccaggccgagctgtgggatttcgtgctgaagatgcagaagtgcaacagcttcacacacgaggtggacaaggacgaggtgttcaacatcctgagagagctgtacgaggaactggtgcccagcagcgtggaaaagaagggcgaagccaaccagctgagcaacaagtttctgtaccctctggtggaccccaacagccagtctggaaagggaacagccagcagcggcagaaagcccagatggtacaacctgaagattgccggcgatccctcctgggaagaagagaagaagaagtgggaagaagataagaaaaaggacccgctggccaagatcctgggcaagctggctgagtacggactgatccctctgttcatcccctacaccgacagcaacgagcccatcgtgaaagaaatcaagtggatggaaaagtcccggaaccagagcgtgcggcggctggataaggacatgttcattcaggccctggaacggttcctgagctgggagagctggaacctgaaagtgaaagaggaatacgagaaggtcgagaaagagtacaagaccctggaagagaggatcaaagaggacatccaggctctgaaggctctggaacagtatgagaaagagcggcaagaacagctgctgcgggacaccctgaacaccaacgagtaccggctgagcaagagaggccttagaggctggcgggaaatcatccagaaatggctgaaaatggacgagaacgagccctccgagaagtacctggaagtgttcaaggactaccagcggaagcaccctagagaggccggcgattacagcgtgtacgagttcctgtccaagaaagagaaccacttcatctggcggaatcaccctgagtacccctacctgtacgccaccttctgcgagatcgacaagaaaaagaaggacgccaagcagcaggccaccttcacactggccgatcctatcaatcaccctctgtgggtccgattcgaggaaagaagcggcagcaacctgaacaagtacagaatcctgaccgagcagctgcacaccgagaagctgaagaaaaagctgacagtgcagctggaccggctgatctaccctacagaatctggcggctgggaagagaagggcaaagtggacattgtgctgctgcccagccggcagttctacaaccagatcttcctggacatcgaggaaaagggcaagcacgccttcacctacaaggatgagagcatcaagttccctctgaagggcacactcggcggagccagagtgcagttcgacagagatcacctgagaagataccctcacaaggtggaaagcggcaacgtgggcagaatctacttcaacatgaccgtgaacatcgagcctacagagtccccagtgtccaagtctctgaagatccaccgggacgacttccccaaggtggtcaacttcaagcccaaagaactgaccgagtggatcaaggacagcaagggcaagaaactgaagtccggcatcgagtccctggaaatcggcctgagagtgatgagcatcgacctgggacagagacaggccgctgccgcctctattttcgaggtggtggatcagaagcccgacatcgaaggcaagctgtttttcccaatcaagggcaccgagctgtatgccgtgcacagagccagcttcaacatcaagctgcccggcgagacactggtcaagagcagagaagtgctgcggaaggccagagaggacaatctgaaactgatgaaccagaagctcaacttcctgcggaacgtgctgcacttccagcagttcgaggacatcaccgagagagagaagcgggtcaccaagtggatcagcagacaagagaacagcgacgtgcccctggtgtaccaggatgagctgatccagatccgcgagctgatgtacaagccttacaaggactgggtcgccttcctgaagcagctccacaagagactggaagtcgagatcggcaaagaagtgaagcactggcggaagtccctgagcgacggaagaaagggcctgtacggcatctccctgaagaacatcgacgagatcgatcggacccggaagttcctgctgagatggtccctgaggcctaccgaacctggcgaagtgcgtagactggaacccggccagagattcgccatcgaccagctgaatcacctgaacgccctgaaagaagatcggctgaagaagatggccaacaccatcatcatgcacgccctgggctactgctacgacgtgcggaagaagaaatggcaggctaagaaccccgcctgccagatcatcctgttcgaggatctgagcaactacaacccctacgaggaaaggtcccgcttcgagaacagcaagctcatgaagtggtccagacgcgagatccccagacaggttgcactgcagggcgagatctatggcctgcaagtgggagaagtgggcgctcagttcagcagcagattccacgccaagacaggcagccctggcatcagatgtagcgtcgtgaccaaagagaagctgcaggacaatcggttcttcaagaatctgcagagagagggcagactgaccctggacaaaatcgccgtgctgaaagagggcgatctgtacccagacaaaggcggcgagaagttcatcagcctgagcaaggatcggaagtgcgtgaccacacacgccgacatcaacgccgctcagaacctgcagaagcggttctggacaagaacccacggcttctacaaggtgtactgcaaggcctaccaggtggacggccagaccgtgtacatccctgagagcaaggaccagaagcagaagatcatcgaagagttcggcgagggctacttcattctgaaggacggggtgtacgaatgggtcaacgccggcaagggaggctctggaggaagctccgaagtcgagttttcccatgagtactggatgagacacgcattgactctcgcaaagagggctcgagatgaacgcgaggtgcccgtgggggcagtactcgtgctcaacaatcgcgtaatcggcgaaggttggaatagggcaatcggactccacgaccccactgcacatgcggaaatcatggcccttcgacagggagggcttgtgatgcagaattatcgactttatgatgcgacgctgtacgtcacgtttgaaccttgcgtaatgtgcgcgggagctatgattcactcccgcattggacgagttgtattcggtgttcgcaacgccaagacgggtgccgcaggttcactgatggacgtgctgcatcatccaggcatgaaccaccgggtagaaatcacagaaggcatattggcggacgaatgtgcggcgctgttgtgtcgtttttttcgcatgcccaggcgggtctttaacgcccagaaaaaagcacaatcctctactgacggctcttctggatctgaaacacctggcacaagcgagagcgccacccctgagagctctggcctgaaaatcaagaagggcagctccaagcagagcagcagcgagctggtggatagcgacatcctgaaagacagcttcgacctggcctccgagctgaaaggcgaaaagctgatgctgtacagggaccccagcggcaatgtgttccccagcgacaaatggatggccgctggcgtgttcttcggaaagctggaacgcatcctgatcagcaagctgaccaaccagtactccatcagcaccatcgaggacgacagcagcaagcagtctatgaaaaggccggcggccacgaaaaaggccggccaggcaaaaaagaaaaagggatcctacccatacgatgttccagattacgcttatccctacgacgtgcctgattatgcatacccatatgatgtccccgactatgcctaa

SEQ ID NO: 124 - protein, 1361 aa, Artificial Sequence
  Description of Artificial Sequence: Synthetic polypeptide
MAPKKKRKVGIHGVPAAATRSFILKIEPNEEVKKGLWKTHEVLNHGIAYYMNILKLIRQEAIYEHHEQDPKNPKKVSKAEIQAELWDFVLKMQKCNSFTHEVDKDEVFNILRELYEELVPSSVEKKGEANQLSNKFLYPLVDPNSQSGKGTASSGRKPRWYNLKIAGDPSWEEEKKKWEEDKKKDPLAKILGKLAEYGLIPLFIPYTDSNEPIVKEIKWMEKSRNQSVRRLDKDMFIQALERFLSWESWNLKVKEEYEKVEKEYKTLEERIKEDIQALKALEQYEKERQEQLLRDTLNTNEYRLSKRGLRGWREIIQKWLKMDENEPSEKYLEVFKDYQRKHPREAGDYSVYEFLSKKENHFIWRNHPEYPYLYATFCEIDKKKKDAKQQATFTLADPINHPLWVRFEERSGSNLNKYRILTEQLHTEKLKKKLTVQLDRLIYPTESGGWEEKGKVDIVLLPSRQFYNQIFLDIEEKGKHAFTYKDESIKFPLKGTLGGARVQFDRDHLRRYPHKVESGNVGRIYFNMTVNIEPTESPVSKSLKIHRDDFPKVVNFKPKELTEWIKDSKGKKLKSGIESLEIGLRVMSIDLGQRQAAAASIFEVVDQKPDIEGKLFFPIKGTELYAVHRASFNIKLPGETLVKSREVLRKAREDNLKLMNQKLNFLRNVLHFQQFEDITEREKRVTKWISRQENSDVPLVYQDELIQIRELMYKPYKDWVAFLKQLHKRLEVEIGKEVKHWRKSLSDGRKGLYGISLKNIDEIDRTRKFLLRWSLRPTEPGEVRRLEPGQRFAIDQLNHLNALKEDRLKKMANTIIMHALGYCYDVRKKKWQAKNPACQIILFEDLSNYNPYEERSRFENSKLMKWSRREIPRQVALQGEIYGLQVGEVGAQFSSRFHAKTGSPGIRCSVVTKEKLQDNRFFKNLQREGRLTLDKIAVLKEGDLYPDKGGEKFISLSKDRKCVTTHADINAAQNLQKRFWTRTHGFYKVYCKAYQVDGQTVYIPESKDQKQKIIEEFGEGYFILKDGVYEWVNAGKGGSGGSSEVEFSHEYWMRHALTLAKRARDEREVPVGAVLVLNNRVIGEGWNRAIGLHDPTAHAEIMALRQGGLVMQNYRLYDATLYVTFEPCVMCAGAMIHSRIGRVVFGVRNAKTGAAGSLMDVLHHPGMNHRVEITEGILADECAALLCRFFRMPRRVFNAQKKAQSSTDGSSGSETPGTSESATPESSGLKIKKGSSKQSSSELVDSDILKDSFDLASELKGEKLMLYRDPSGNVFPSDKWMAAGVFFGKLERILISKLTNQYSISTIEDDSSKQSMKRPAATKKAGQAKKKKGSYPYDVPDYAYPYDVPDYAYPYDVPDYA

SEQ ID NO: 125 - protein, 7 aa, Artificial Sequence
  Description of Artificial Sequence: Synthetic peptide
GGGSGGS

SEQ ID NO: 126 - DNA, 117 bp, Artificial Sequence
  Description of Artificial Sequence: Synthetic polynucleotide
  modified_base (98)..(117): a, c, t, g, unknown or other
gttctgtcttttggtcaggacaaccgtctagctataagtgctgcagggtgtgagaaactcctattgctggacgatgtctcttacgaggcattagcacnnnnnnnnnnnnnnnnnnnn

SEQ ID NO: 127 - DNA, 108 bp, Artificial Sequence
  Description of Artificial Sequence: Synthetic polynucleotide
  modified_base (89)..(108): a, c, t, g, unknown or other
gacctatagggtcaatgaatctgtgcgtgtgccataagtaattaaaaattacccaccacaggagcacctgaaaacaggtgcttggcacnnnnnnnnnnnnnnnnnnnn

SEQ ID NO: 128 - DNA, 119 bp, Artificial Sequence
  Description of Artificial Sequence: Synthetic polynucleotide
  modified_base (100)..(119): a, c, t, g, unknown or other
gtctaaaggacagaatttttcaacgggtgtgccaatggccactttccaggtggcaaagcccgttgaacttctcaaaaagaacgatctgagaagtggcacnnnnnnnnnnnnnnnnnnnn

SEQ ID NO: 129 - protein, 1368 aa, Streptococcus pyogenes
MDKKYSIGLAIGTNSVGWAVITDEYKVPSKKFKVLGNTDRHSIKKNLIGALLFDSGETAEATRLKRTARRRYTRRKNRICYLQEIFSNEMAKVDDSFFHRLEESFLVEEDKKHERHPIFGNIVDEVAYHEKYPTIYHLRKKLVDSTDKADLRLIYLALAHMIKFRGHFLIEGDLNPDNSDVDKLFIQLVQTYNQLFEENPINASGVDAKAILSARLSKSRRLENLIAQLPGEKKNGLFGNLIALSLGLTPNFKSNFDLAEDAKLQLSKDTYDDDLDNLLAQIGDQYADLFLAAKNLSDAILLSDILRVNTEITKAPLSASMIKRYDEHHQDLTLLKALVRQQLPEKYKEIFFDQSKNGYAGYIDGGASQEEFYKFIKPILEKMDGTEELLVKLNREDLLRKQRTFDNGSIPHQIHLGELHAILRRQEDFYPFLKDNREKIEKILTFRIPYYVGPLARGNSRFAWMTRKSEETITPWNFEEVVDKGASAQSFIERMTNFDKNLPNEKVLPKHSLLYEYFTVYNELTKVKYVTEGMRKPAFLSGEQKKAIVDLLFKTNRKVTVKQLKEDYFKKIECFDSVEISGVEDRFNASLGTYHDLLKIIKDKDFLDNEENEDILEDIVLTLTLFEDREMIEERLKTYAHLFDDKVMKQLKRRRYTGWGRLSRKLINGIRDKQSGKTILDFLKSDGFANRNFMQLIHDDSLTFKEDIQKAQVSGQGDSLHEHIANLAGSPAIKKGILQTVKVVDELVKVMGRHKPENIVIEMARENQTTQKGQKNSRERMKRIEEGIKELGSQILKEHPVENTQLQNEKLYLYYLQNGRDMYVDQELDINRLSDYDVDHIVPQSFLKDDSIDNKVLTRSDKNRGKSDNVPSEEVVKKMKNYWRQLLNAKLITQRKFDNLTKAERGGLSELDKAGFIKRQLVETRQITKHVAQILDSRMNTKYDENDKLIREVKVITLKSKLVSDFRKDFQFYKVREINNYHHAHDAYLNAVVGTALIKKYPKLESEFVYGDYKVYDVRKMIAKSEQEIGKATAKYFFYSNIMNFFKTEITLANGEIRKRPLIETNGETGEIVWDKGRDFATVRKVLSMPQVNIVKKTEVQTGGFSKESILPKRNSDKLIARKKDWDPKKYGGFESPTVAYSVLVVAKVEKGKSKKLKSVKELLGITIMERSSFEKNPIDFLEAKGYKEVKKDLIIKLPKYSLFELENGRKRMLASAGELQKGNELALPSKYVNFLYLASHYEKLKGSPEDNEQKQLFVEQHKHYLDEIIEQISEFSKRVILADANLDKVLSAYNKHRDKPIREQAENIIHLFTLTNLGAPAAFKYFDTTIDRKQYRSTKEVLDATLIHQSITGLYETRIDLSQLGGD

SEQ ID NO: 130 - protein, 1368 aa, Streptococcus pyogenes
MDKKYSIGLAIGTNSVGWAVITDEYKVPSKKFKVLGNTDRHSIKKNLIGALLFDSGETAEATRLKRTARRRYTRRKNRICYLQEIFSNEMAKVDDSFFHRLEESFLVEEDKKHERHPIFGNIVDEVAYHEKYPTIYHLRKKLVDSTDKADLRLIYLALAHMIKFRGHFLIEGDLNPDNSDVDKLFIQLVQTYNQLFEENPINASGVDAKAILSARLSKSRRLENLIAQLPGEKKNGLFGNLIALSLGLTPNFKSNFDLAEDAKLQLSKDTYDDDLDNLLAQIGDQYADLFLAAKNLSDAILLSDILRVNTEITKAPLSASMIKRYDEHHQDLTLLKALVRQQLPEKYKEIFFDQSKNGYAGYIDGGASQEEFYKFIKPILEKMDGTEELLVKLNREDLLRKQRTFDNGSIPHQIHLGELHAILRRQEDFYPFLKDNREKIEKILTFRIPYYVGPLARGNSRFAWMTRKSEETITPWNFEEVVDKGASAQSFIERMTNFDKNLPNEKVLPKHSLLYEYFTVYNELTKVKYVTEGMRKPAFLSGEQKKAIVDLLFKTNRKVTVKQLKEDYFKKIECFDSVEISGVEDRFNASLGTYHDLLKIIKDKDFLDNEENEDILEDIVLTLTLFEDREMIEERLKTYAHLFDDKVMKQLKRRRYTGWGRLSRKLINGIRDKQSGKTILDFLKSDGFANRNFMQLIHDDSLTFKEDIQKAQVSGQGDSLHEHIANLAGSPAIKKGILQTVKVVDELVKVMGRHKPENIVIEMARENQTTQKGQKNSRERMKRIEEGIKELGSQILKEHPVENTQLQNEKLYLYYLQNGRDMYVDQELDINRLSDYDVDHIVPQSFLKDDSIDNKVLTRSDKNRGKSDNVPSEEVVKKMKNYWRQLLNAKLITQRKFDNLTKAERGGLSELDKAGFIKRQLVETRQITKHVAQILDSRMNTKYDENDKLIREVKVITLKSKLVSDFRKDFQFYKVREINNYHHAHDAYLNAVVGTALIKKYPKLESEFVYGDYKVYDVRKMIAKSEQEIGKATAKYFFYSNIMNFFKTEITLANGEIRKRPLIETNGETGEIVWDKGRDFATVRKVLSMPQVNIVKKTEVQTGGFSKESILPKRNSDKLIARKKDWDPKKYGGFVSPTVAYSVLVVAKVEKGKSKKLKSVKELLGITIMERSSFEKNPIDFLEAKGYKEVKKDLIIKLPKYSLFELENGRKRMLASAGELQKGNELALPSKYVNFLYLASHYEKLKGSPEDNEQKQLFVEQHKHYLDEIIEQISEFSKRVILADANLDKVLSAYNKHRDKPIREQAENIIHLFTLTNLGAPAAFKYFDTTIDRKQYRSTKEVLDATLIHQSITGLYETRIDLSQLGGD

SEQ ID NO: 131 - protein, 1368 aa, Streptococcus pyogenes
MDKKYSIGLAIGTNSVGWAVITDEYKVPSKKFKVLGNTDRHSIKKNLIGALLFDSGETAEATRLKRTARRRYTRRKNRICYLQEIFSNEMAKVDDSFFHRLEESFLVEEDKKHERHPIFGNIVDEVAYHEKYPTIYHLRKKLVDSTDKADLRLIYLALAHMIKFRGHFLIEGDLNPDNSDVDKLFIQLVQTYNQLFEENPINASGVDAKAILSARLSKSRRLENLIAQLPGEKKNGLFGNLIALSLGLTPNFKSNFDLAEDAKLQLSKDTYDDDLDNLLAQIGDQYADLFLAAKNLSDAILLSDILRVNTEITKAPLSASMIKRYDEHHQDLTLLKALVRQQLPEKYKEIFFDQSKNGYAGYIDGGASQEEFYKFIKPILEKMDGTEELLVKLNREDLLRKQRTFDNGSIPHQIHLGELHAILRRQEDFYPFLKDNREKIEKILTFRIPYYVGPLARGNSRFAWMTRKSEETITPWNFEEVVDKGASAQSFIERMTNFDKNLPNEKVLPKHSLLYEYFTVYNELTKVKYVTEGMRKPAFLSGEQKKAIVDLLFKTNRKVTVKQLKEDYFKKIECFDSVEISGVEDRFNASLGTYHDLLKIIKDKDFLDNEENEDILEDIVLTLTLFEDREMIEERLKTYAHLFDDKVMKQLKRRRYTGWGRLSRKLINGIRDKQSGKTILDFLKSDGFANRNFMQLIHDDSLTFKEDIQKAQVSGQGDSLHEHIANLAGSPAIKKGILQTVKVVDELVKVMGRHKPENIVIEMARENQTTQKGQKNSRERMKRIEEGIKELGSQILKEHPVENTQLQNEKLYLYYLQNGRDMYVDQELDINRLSDYDVDHIVPQSFLKDDSIDNKVLTRSDKNRGKSDNVPSEEVVKKMKNYWRQLLNAKLITQRKFDNLTKAERGGLSELDKAGFIKRQLVETRQITKHVAQILDSRMNTKYDENDKLIREVKVITLKSKLVSDFRKDFQFYKVREINNYHHAHDAYLNAVVGTALIKKYPKLESEFVYGDYKVYDVRKMIAKSEQEIGKATAKYFFYSNIMNFFKTEITLANGEIRKRPLIETNGETGEIVWDKGRDFATVRKVLSMPQVNIVKKTEVQTGGFSKESILPKRNSDKLIARKKDWDPKKYGGFVSPTVAYSVLVVAKVEKGKSKKLKSVKELLGITIMERSSFEKNPIDFLEAKGYKEVKKDLIIKLPKYSLFELENGRKRMLASARELQKGNELALPSKYVNFLYLASHYEKLKGSPEDNEQKQLFVEQHKHYLDEIIEQISEFSKRVILADANLDKVLSAYNKHRDKPIREQAENIIHLFTLTNLGAPAAFKYFDTTIDRKEYRSTKEVLDATLIHQSITGLYETRIDLSQLGGD

SEQ ID NO: 132 - protein, 1359 aa, Artificial Sequence
  Description of Artificial Sequence: Synthetic polypeptide
MDKKYSIGLDIGTNSVGWAVITDDYKVPSKKFKVLGNTDRHSIKKNLIGALLFGSGETAEATRLKRTARRRYTRRKNRICYLQEIFSNEMAKVDDSFFHRLEESFLVEEDKKHERHPIFGNIVDEVAYHEKYPTIYHLRKKLADSTDKADLRLIYLALAHMIKFRGHFLIEGDLNPDNSDVDKLFIQLVQIYNQLFEENPINASRVDAKAILSARLSKSRRLENLIAQLPGEKRNGLFGNLIALSLGLTPNFKSNFDLAEDAKLQLSKDTYDDDLDNLLAQIGDQYADLFLAAKNLSDAILLSDILRVNSEITKAPLSASMIKRYDEHHQDLTLLKALVRQQLPEKYKEIFFDQSKNGYAGYIDGGASQEEFYKFIKPILEKMDGTEELLVKLNREDLLRKQRTFDNGSIPHQIHLGELHAILRRQEDFYPFLKDNREKIEKILTFRIPYYVGPLARGNSRFAWMTRKSEETITPWNFEEVVDKGASAQSFIERMTNFDKNLPNEKVLPKHSLLYEYFTVYNELTKVKYVTEGMRKPAFLSGEQKKAIVDLLFKTNRKVTVKQLKEDYFKKIECFDSVEISGVEDRFNASLGAYHDLLKIIKDKDFLDNEENEDILEDIVLTLTLFEDRGMIEERLKTYAHLFDDKVMKQLKRRRYTGWGRLSRKLINGIRDKQSGKTILDFLKSDGFANRNFMQLIHDDSLTFKEDIQKAQVSGQGHSLHEQIANLAGSPAIKKGILQTVKIVDELVKVMGHKPENIVIEMARENQTTQKGQKNSRERMKRIEEGIKELGSQILKEHPVENTQLQNEKLYLYYLQNGRDMYVDQELDINRLSDYDVDHIVPQSFIKDDSIDNKVLTRSDKNRGKSDNVPSEEVVKKMKNYWRQLLNAKLITQRKFDNLTKAERGGLSELDKAGFIKRQLVETRQITKHVAQILDSRMNTKYDENDKLIREVKVITLKSKLVSDFRKDFQFYKVREINNYHHAHDAYLNAVVGTALIKKYPKLESEFVYGDYKVYDVRKMIAKSEQEIGKATAKYFFYSNIMNFFKTEITLANGEIRKRPLIETNGETGEIVWDKGRDFATVRKVLSMPQVNIVKKTEIQTVGQNGGLFDDNPKSPLEVTPSKLVPLKKELNPKKYGGYQKPTTAYPVLLITDTKQLIPISVMNKKQFEQNPVKFLRDRGYQQVGKNDFIKLPKYTLVDIGDGIKRLWASSKEIHKGNQLVVSKKSQILLYHAHHLDSDLSNDYLQNHNQQFDVLFNEIISFSKKCKLGKEHIQKIENVYSNKKNSASIEELAESFIKLLGFTQLGATSPFNFLGVKLNQKQYKGKKDYILPCTEGTLIRQSITGLYETRVDLSKIGED

SEQ ID NO: 133 - protein, 1367 aa, Artificial Sequence
  Description of Artificial Sequence: Synthetic polypeptide
DKKYSIGLAIGTNSVGWAVITDEYKVPSKKFKVLGNTDRHSIKKNLIGALLFDSGETAEATRLKRTARRRYTRRKNRICYLQEIFSNEMAKVDDSFFHRLEESFLVEEDKKHERHPIFGNIVDEVAYHEKYPTIYHLRKKLVDSTDKADLRLIYLALAHMIKFRGHFLIEGDLNPDNSDVDKLFIQLVQTYNQLFEENPINASGVDAKAILSARLSKSRRLENLIAQLPGEKKNGLFGNLIALSLGLTPNFKSNFDLAEDAKLQLSKDTYDDDLDNLLAQIGDQYADLFLAAKNLSDAILLSDILRVNTEITKAPLSASMIKRYDEHHQDLTLLKALVRQQLPEKYKEIFFDQSKNGYAGYIDGGASQEEFYKFIKPILEKMDGTEELLVKLNREDLLRKQRTFDNGSIPHQIHLGELHAILRRQEDFYPFLKDNREKIEKILTFRIPYYVGPLARGNSRFAWMTRKSEETITPWNFEEVVDKGASAQSFIERMTAFDKNLPNEKVLPKHSLLYEYFTVYNELTKVKYVTEGMRKPAFLSGEQKKAIVDLLFKTNRKVTVKQLKEDYFKKIECFDSVEISGVEDRFNASLGTYHDLLKIIKDKDFLDNEENEDILEDIVLTLTLFEDREMIEERLKTYAHLFDDKVMKQLKRRRYTGWGALSRKLINGIRDKQSGKTILDFLKSDGFANRNFMALIHDDSLTFKEDIQKAQVSGQGDSLHEHIANLAGSPAIKKGILQTVKVVDELVKVMGRHKPENIVIEMARENQTTQKGQKNSRERMKRIEEGIKELGSQILKEHPVENTQLQNEKLYLYYLQNGRDMYVDQELDINRLSDYDVDHIVPQSFLKDDSIDNKVLTRSDKNRGKSDNVPSEEVVKKMKNYWRQLLNAKLITQRKFDNLTKAERGGLSELDKAGFIKRQLVETRAITKHVAQILDSRMNTKYDENDKLIREVKVITLKSKLVSDFRKDFQFYKVREINNYHHAHDAYLNAVVGTALIKKYPKLESEFVYGDYKVYDVRKMIAKSEQEIGKATAKYFFYSNIMNFFKTEITLANGEIRKRPLIETNGETGEIVWDKGRDFATVRKVLSMPQVNIVKKTEVQTGGFSKESILPKRNSDKLIARKKDWDPKKYGGFDSPTVAYSVLVVAKVEKGKSKKLKSVKELLGITIMERSSFEKNPIDFLEAKGYKEVKKDLIIKLPKYSLFELENGRKRMLASAGELQKGNELALPSKYVNFLYLASHYEKLKGSPEDNEQKQLFVEQHKHYLDEIIEQISEFSKRVILADANLDKVLSAYNKHRDKPIREQAENIIHLFTLTNLGAPAAFKYFDTTIDRKRYTSTKEVLDATLIHQSITGLYETRIDLSQLGGD

SEQ ID NO: 134 - protein, 29 aa, Artificial Sequence
  Description of Artificial Sequence: Synthetic peptide
PKKKRKVEGADKRTADGSEFESPKKKRKV

SEQ ID NO: 135 - protein, 23 aa, Artificial Sequence
  Description of Artificial Sequence: Synthetic peptide
RKSGKIAAIVVKRPRKPKKKRKV

SEQ ID NO: 136 - protein, 16 aa, Artificial Sequence
  Description of Artificial Sequence: Synthetic peptide
KRPAATKKAGQAKKKK

SEQ ID NO: 137 - protein, 167 aa, Escherichia coli; identical to SEQ ID NO: 15

SEQ ID NO: 138 - protein, 1554 aa, Artificial Sequence
  Description of Artificial Sequence: Synthetic polypeptide
MDKKYSIGLAIGTNSVGWAVITDEYKVPSKKFKVLGNTDRHSIKKNLIGALLFDSGETAEATRLKRTARRRYTRRKNRICYLQEIFSNEMAKVDDSFFHRLEESFLVEEDKKHERHPIFGNIVDEVAYHEKYPTIYHLRKKLVDSTDKADLRLIYLALAHMIKFRGHFLIEGDLNPDNSDVDKLFIQLVQTYNQLFEENPINASGVDAKAILSARLSKSRRLENLIAQLPGEKKNGLFGNLIALSLGLTPNFKSNFDLAEDAKLQLSKDTYDDDLDNLLAQIGDQYADLFLAAKNLSDAILLSDILRVNTEITKAPLSASMIKRYDEHHQDLTLLKALVRQQLPEKYKEIFFDQSKNGYAGYIDGGASQEEFYKFIKPILEKMDGTEELLVKLNREDLLRKQRTFDNGSIPHQIHLGELHAILRRQEDFYPFLKDNREKIEKILTFRIPYYVGPLARGNSRFAWMTRKSEETITPWNFEEVVDKGASAQSFIERMTNFDKNLPNEKVLPKHSLLYEYFTVYNELTKVKYVTEGMRKPAFLSGEQKKAIVDLLFKTNRKVTVKQLKEDYFKKIECFDSVEISGVEDRFNASLGTYHDLLKIIKDKDFLDNEENEDILEDIVLTLTLFEDREMIEERLKTYAHLFDDKVMKQLKRRRYTGWGRLSRKLINGIRDKQSGKTILDFLKSDGFANRNFMQLIHDDSLTFKEDIQKAQVSGQGDSLHEHIANLAGSPAIKKGILQTVKVVDELVKVMGRHKPENIVIEMARENQTTQKGQKNSRERMKRIEEGIKELGSQILKEHPVENTQLQNEKLYLYYLQNGRDMYVDQELDINRLSDYDVDHIVPQSFLKDDSIDNKVLTRSDKNRGKSDNVPSEEVVKKMKNYWRQLLNAKLITQRKFDNLTKAERGGLSELDKAGFIKRQLVETRQITKHVAQILDSRMNTKYDENDKLIREVKVITLKSKLVSDFRKDFQFYKVREINNYHHAHDAYLNAVVGTALIKKYPKLESEFVYGDYKVGSSGSETPGTSESATPESSGSEVEFSHEYWMRHALTLAKRARDEREVPVGAVLVLNNRVIGEGWNRAIGLHDPTAHAEIMALRQGGLVMQNYRLIDATLYVTFEPCVMCAGAMIHSRIGRVVFGVRNAKTGAAGSLMDVLHYPGMNHRVEITEGILADECAALLCYFFRMPRQVFNAQKKAQSSTDYDVRKMIAKSEQEIGKATAKYFFYSNIMNFFKTEITLANGEIRKRPLIETNGETGEIVWDKGRDFATVRKVLSMPQVNIVKKTEVQTGGFSKESILPKRNSDKLIARKKDWDPKKYGGFDSPTVAYSVLVVAKVEKGKSKKLKSVKELLGITIMERSSFEKNPIDFLEAKGYKEVKKDLIIKLPKYSLFELENGRKRMLASAGELQKGNELALPSKYVNFLYLASHYEKLKGSPEDNEQKQLFVEQHKHYLDEIIEQISEFSKRVILADANLDKVLSAYNKHRDKPIREQAENIIHLFTLTNLGAPAAFKYFDTTIDRKRYTSTKEVLDATLIHQSITGLYETRIDLSQLGGD

SEQ ID NO: 139 - protein, 1554 aa, Artificial Sequence
  Description of Artificial Sequence: Synthetic polypeptide
MDKKYSIGLAIGTNSVGWAVITDEYKVPSKKFKVLGNTDRHSIKKNLIGALLFDSGETAEATRLKRTARRRYTRRKNRICYLQEIFSNEMAKVDDSFFHRLEESFLVEEDKKHERHPIFGNIVDEVAYHEKYPTIYHLRKKLVDSTDKADLRLIYLALAHMIKFRGHFLIEGDLNPDNSDVDKLFIQLVQTYNQLFEENPINASGVDAKAILSARLSKSRRLENLIAQLPGEKKNGLFGNLIALSLGLTPNFKSNFDLAEDAKLQLSKDTYDDDLDNLLAQIGDQYADLFLAAKNLSDAILLSDILRVNTEITKAPLSASMIKRYDEHHQDLTLLKALVRQQLPEKYKEIFFDQSKNGYAGYIDGGASQEEFYKFIKPILEKMDGTEELLVKLNREDLLRKQRTFDNGSIPHQIHLGELHAILRRQEDFYPFLKDNREKIEKILTFRIPYYVGPLARGNSRFAWMTRKSEETITPWNFEEVVDKGASAQSFIERMTNFDKNLPNEKVLPKHSLLYEYFTVYNELTKVKYVTEGMRKPAFLSGEQKKAIVDLLFKTNRKVTVKQLKEDYFKKIECFDSVEISGVEDRFNASLGTYHDLLKIIKDKDFLDNEENEDILEDIVLTLTLFEDREMIEERLKTYAHLFDDKVMKQLKRRRYTGWGRLSRKLINGIRDKQSGKTILDFLKSDGFANRNFMQLIHDDSLTFKEDIQKAQVSGQGDSLHEHIANLAGSPAIKKGILQTVKVVDELVKVMGRHKPENIVIEMARENQTTQKGQKNSRERMKRIEEGIKELGSQILKEHPVENTQLQNEKLYLYYLQNGRDMYVDQELDINRLSDYDVDHIVPQSFLKDDSIDNKVLTRSDKNRGKSDNVPSEEVVKKMKNYWRQLLNAKLITQRKFDNLTKAERGGLSELDKAGFIKRQLVETRQITKHVAQILDSRMNTKYDENDKLIREVKVITLKSKLVSDFRKDFQFYKVREINNYHHAHDAYLNAVVGTALIKKYPKLESEFVYGDYKVYDVRKMIGSSGSETPGTSESATPESSGSEVEFSHEYWMRHALTLAKRARDEREVPVGAVLVLNNRVIGEGWNRAIGLHDPTAHAEIMALRQGGLVMQNYRLIDATLYVTFEPCVMCAGAMIHSRIGRVVFGVRNAKTGAAGSLMDVLHYPGMNHRVEITEGILADECAALLCYFFRMPRQVFNAQKKAQSSTDAKSEQEIGKATAKYFFYSNIMNFFKTEITLANGEIRKRPLIETNGETGEIVWDKGRDFATVRKVLSMPQVNIVKKTEVQTGGFSKESILPKRNSDKLIARKKDWDPKKYGGFDSPTVAYSVLVVAKVEKGKSKKLKSVKELLGITIMERSSFEKNPIDFLEAKGYKEVKKDLIIKLPKYSLFELENGRKRMLASAGELQKGNELALPSKYVNFLYLASHYEKLKGSPEDNEQKQLFVEQHKHYLDEIIEQISEFSKRVILADANLDKVLSAYNKHRDKPIREQAENIIHLFTLTNLGAPAAFKYFDTTIDRKRYTSTKEVLDATLIHQSITGLYETRIDLSQLGGD

SEQ ID NO: 140 - protein, 1554 aa, Artificial Sequence
  Description of Artificial Sequence: Synthetic polypeptide
MDKKYSIGLAIGTNSVGWAVITDEYKVPSKKFKVLGNTDRHSIKKNLIGALLFDSGETAEATRLKRTARRRYTRRKNRICYLQEIFSNEMAKVDDSFFHRLEESFLVEEDKKHERHPIFGNIVDEVAYHEKYPTIYHLRKKLVDSTDKADLRLIYLALAHMIKFRGHFLIEGDLNPDNSDVDKLFIQLVQTYNQLFEENPINASGVDAKAILSARLSKSRRLENLIAQLPGEKKNGLFGNLIALSLGLTPNFKSNFDLAEDAKLQLSKDTYDDDLDNLLAQIGDQYADLFLAAKNLSDAILLSDILRVNTEITKAPLSASMIKRYDEHHQDLTLLKALVRQQLPEKYKEIFFDQSKNGYAGYIDGGASQEEFYKFIKPILEKMDGTEELLVKLNREDLLRKQRTFDNGSIPHQIHLGELHAILRRQEDFYPFLKDNREKIEKILTFRIPYYVGPLARGNSRFAWMTRKSEETITPWNFEEVVDKGASAQSFIERMTNFDKNLPNEKVLPKHSLLYEYFTVYNELTKVKYVTEGMRKPAFLSGEQKKAIVDLLFKTNRKVTVKQLKEDYFKKIECFDSVEISGVEDRFNASLGTYHDLLKIIKDKDFLDNEENEDILEDIVLTLTLFEDREMIEERLKTYAHLFDDKVMKQLKRRRYTGWGRLSRKLINGIRDKQSGKTILDFLKSDGFANRNFMQLIHDDSLTFKEDIQKAQVSGQGDSLHEHIANLAGSPAIKKGILQTVKVVDELVKVMGRHKPENIVIEMARENQTTQKGQKNSRERMKRIEEGIKELGSQILKEHPVENTQLQNEKLYLYYLQNGRDMYVDQELDINRLSDYDVDHIVPQSFLKDDSIDNKVLTRSDKNRGKSDNVPSEEVVKKMKNYWRQLLNAKLITQRKFDNLTKAERGGLSELDKAGFIKRQLVETRQITKHVAQILDSRMNTKYDENDKLIREVKVITLKSKLVSDFRKDFQFYKVREINNYHHAHDAYLNAVVGTALIKKYPKLESEFVYGDYKVYDVRKMIAKSEQEIGSSGSETPGTSESATPESSGSEVEFSHEYWMRHALTLAKRARDEREVPVGAVLVLNNRVIGEGWNRAIGLHDPTAHAEIMALRQGGLVMQNYRLIDATLYVTFEPCVMCAGAMIHSRIGRVVFGVRNAKTGAAGSLMDVLHYPGMNHRVEITEGILADECAALLCYFFRMPRQVFNAQKKAQSSTDGKATAKYFFYSNIMNFFKTEITLANGEIRKRPLIETNGETGEIVWDKGRDFATVRKVLSMPQVNIVKKTEVQTGGFSKESILPKRNSDKLIARKKDWDPKKYGGFDSPTVAYSVLVVAKVEKGKSKKLKSVKELLGITIMERSSFEKNPIDFLEAKGYKEVKKDLIIKLPKYSLFELENGRKRMLASAGELQKGNELALPSKYVNFLYLASHYEKLKGSPEDNEQKQLFVEQHKHYLDEIIEQISEFSKRVILADANLDKVLSAYNKHRDKPIREQAENIIHLFTLTNLGAPAAFKYFDTTIDRKRYTSTKEVLDATLIHQSITGLYETRIDLSQLGGD

SEQ ID NO: 141 - protein, 1554 aa, Artificial Sequence
  Description of Artificial Sequence: Synthetic polypeptide
MDKKYSIGLAIGTNSVGWAVITDEYKVPSKKFKVLGNTDRHSIKKNLIGALLFDSGETAEATRLKRTARRRYTRRKNRICYLQEIFSNEMAKVDDSFFHRLEESFLVEEDKKHERHPIFGNIVDEVAYHEKYPTIYHLRKKLVDSTDKADLRLIYLALAHMIKFRGHFLIEGDLNPDNSDVDKLFIQLVQTYNQLFEENPINASGVDAKAILSARLSKSRRLENLIAQLPGEKKNGLFGNLIALSLGLTPNFKSNFDLAEDAKLQLSKDTYDDDLDNLLAQIGDQYADLFLAAKNLSDAILLSDILRVNTEITKAPLSASMIKRYDEHHQDLTLLKALVRQQLPEKYKEIFFDQSKNGYAGYIDGGASQEEFYKFIKPILEKMDGTEELLVKLNREDLLRKQRTFDNGSIPHQIHLGELHAILRRQEDFYPFLKDNREKIEKILTFRIPYYVGPLARGNSRFAWMTRKSEETITPWNFEEVVDKGASAQSFIERMTNFDKNLPNEKVLPKHSLLYEYFTVYNELTKVKYVTEGMRKPAFLSGEQKKAIVDLLFKTNRKVTVKQLKEDYFKKIECFDSVEISGVEDRFNASLGTYHDLLKIIKDKDFLDNEENEDILEDIVLTLTLFEDREMIEERLKTYAHLFDDKVMKQLKRRRYTGWGRLSRKLINGIRDKQSGKTILDFLKSDGFANRNFMQLIHDDSLTFKEDIQKAQVSGQGDSLHEHIANLAGSPAIKKGILQTVKVVDELVKVMGRHKPENIVIEMARENQTTQKGQKNSRERMKRIEEGIKELGSQILKEHPVENTQLQNEKLYLYYLQNGRDMYVDQELDINRLSDYDVDHIVPQSFLKDDSIDNKVLTRSDKNRGKSDNVPSEEVVKKMKNYWRQLLNAKLITQRKFDNLTKAERGGLSELDKAGFIKRQLVETRQITKHVAQILDSRMNTKYDENDKLIREVKVITLKSKLVSDFRKDFQFYKVREINNYHHAHDAYLNAVVGTALIKKYPKLESEFVYGDYKVYDVRKMIAKSEQEIGKATAKYFFYSGSSGSETPGTSESATPESSGSEVEFSHEYWMRHALTLAKRARDEREVPVGAVLVLNNRVIGEGWNRAIGLHDPTAHAEIMALRQGGLVMQNYRLIDATLYVTFEPCVMCAGAMIHSRIGRVVFGVRNAKTGAAGSLMDVLHYPGMNHRVEITEGILADECAALLCYFFRMPRQVFNAQKKAQSSTDNIMNFFKTEITLANGEIRKRPLIETNGETGEIVWDKGRDFATVRKVLSMPQVNIVKKTEVQTGGFSKESILPKRNSDKLIARKKDWDPKKYGGFDSPTVAYSVLVVAKVEKGKSKKLKSVKELLGITIMERSSFEKNPIDFLEAKGYKEVKKDLIIKLPKYSLFELENGRKRMLASAGELQKGNELALPSKYVNFLYLASHYEKLKGSPEDNEQKQLFVEQHKHYLDEIIEQISEFSKRVILADANLDKVLSAYNKHRDKPIREQAENIIHLFTLTNLGAPAAFKYFDTTIDRKRYTSTKEVLDATLIHQSITGLYETRIDLSQLGGD

SEQ ID NO: 142 - protein, 1554 aa, Artificial Sequence
  Description of Artificial Sequence: Synthetic polypeptide
MDKKYSIGLAIGTNSVGWAVITDEYKVPSKKFKVLGNTDRHSIKKNLIGALLFDSGETAEATRLKRTARRRYTRRKNRICYLQEIFSNEMAKVDDSFFHRLEESFLVEEDKKHERHPIFGNIVDEVAYHEKYPTIYHLRKKLVDSTDKADLRLIYLALAHMIKFRGHFLIEGDLNPDNSDVDKLFIQLVQTYNQLFEENPINASGVDAKAILSARLSKSRRLENLIAQLPGEKKNGLFGNLIALSLGLTPNFKSNFDLAEDAKLQLSKDTYDDDLDNLLAQIGDQYADLFLAAKNLSDAILLSDILRVNTEITKAPLSASMIKRYDEHHQDLTLLKALVRQQLPEKYKEIFFDQSKNGYAGYIDGGASQEEFYKFIKPILEKMDGTEELLVKLNREDLLRKQRTFDNGSIPHQIHLGELHAILRRQEDFYPFLKDNREKIEKILTFRIPYYVGPLARGNSRFAWMTRKSEETITPWNFEEVVDKGASAQSFIERMTNFDKNLPNEKVLPKHSLLYEYFTVYNELTKVKYVTEGMRKPAFLSGEQKKAIVDLLFKTNRKVTVKQLKEDYFKKIECFDSVEISGVEDRFNASLGTYHDLLKIIKDKDFLDNEENEDILEDIVLTLTLFEDREMIEERLKTYAHLFDDKVMKQLKRRRYTGWGRLSRKLINGIRDKQSGKTILDFLKSDGFANRNFMQLIHDDSLTFKEDIQKAQVSGQGDSLHEHIANLAGSPAIKKGILQTVKVVDELVKVMGRHKPENIVIEMARENQTTQKGQKNSRERMKRIEEGIKELGSQILKEHPVENTQLQNEKLYLYYLQNGRDMYVDQELDINRLSDYDVDHIVPQSFLKDDSIDNKVLTRSDKNRGKSDNVPSEEVVKKMKNYWRQLLNAKLITQRKFDNLTKAERGGLSELDKAGFIKRQLVETRQITKHVAQILDSRMNTKYDENDKLIREVKVITLKSKLVSDFRKDFQFYKVREINNYHHAHDAYLNAVVGTALIKKYPKLESEFVYGDYKVYDVRKMIAKSEQEIGKATAKYFFYSNIMNFFKTEITLANGEIRKRPLIETNGEGSSGSETPGTSESATPESSGSEVEFSHEYWMRHALTLAKRARDEREVPVGAVLVLNNRVIGEGWNRAIGLHDPTAHAEIMALRQGGLVMQNYRLIDATLYVTFEPCVMCAGAMIHSRIGRVVFGVRNAKTGAAGSLMDVLHYPGMNHRVEITEGILADECAALLCYFFRMPRQVFNAQKKAQSSTDTGEIVWDKGRDFATVRKVLSMPQVNIVKKTEVQTGGFSKESILPKRNSDKLIARKKDWDPKKYGGFDSPTVAYSVLVVAKVEKGKSKKLKSVKELLGITIMERSSFEKNPIDFLEAKGYKEVKKDLIIKLPKYSLFELENGRKRMLASAGELQKGNELALPSKYVNFLYLASHYEKLKGSPEDNEQKQLFVEQHKHYLDEIIEQISEFSKRVILADANLDKVLSAYNKHRDKPIREQAENIIHLFTLTNLGAPAAFKYFDTTIDRKRYTSTKEVLDATLIHQSITGLYETRIDLSQLGGD

SEQ ID NO: 143 - protein, 1554 aa, Artificial Sequence
  Description of Artificial Sequence: Synthetic polypeptide
MDKKYSIGLAIGTNSVGWAVITDEYKVPSKKFKVLGNTDRHSIKKNLIGALLFDSGETAEATRLKRTARRRYTRRKNRICYLQEIFSNEMAKVDDSFFHRLEESFLVEEDKKHERHPIFGNIVDEVAYHEKYPTIYHLRKKLVDSTDKADLRLIYLALAHMIKFRGHFLIEGDLNPDNSDVDKLFIQLVQTYNQLFEENPINASGVDAKAILSARLSKSRRLENLIAQLPGEKKNGLFGNLIALSLGLTPNFKSNFDLAEDAKLQLSKDTYDDDLDNLLAQIGDQYADLFLAAKNLSDAILLSDILRVNTEITKAPLSASMIKRYDEHHQDLTLLKALVRQQLPEKYKEIFFDQSKNGYAGYIDGGASQEEFYKFIKPILEKMDGTEELLVKLNREDLLRKQRTFDNGSIPHQIHLGELHAILRRQEDFYPFLKDNREKIEKILTFRIPYYVGPLARGNSRFAWMTRKSEETITPWNFEEVVDKGASAQSFIERMTNFDKNLPNEKVLPKHSLLYEYFTVYNELTKVKYVTEGMRKPAFLSGEQKKAIVDLLFKTNRKVTVKQLKEDYFKKIECFDSVEISGVEDRFNASLGTYHDLLKIIKDKDFLDNEENEDILEDIVLTLTLFEDREMIEERLKTYAHLFDDKVMKQLKRRRYTGWGRLSRKLINGIRDKQSGKTILDFLKSDGFANRNFMQLIHDDSLTFKEDIQKAQVSGQGDSLHEHIANLAGSPAIKKGILQTVKVVDELVKVMGRHKPENIVIEMARENQTTQKGQKNSRERMKRIEEGIKELGSQILKEHPVENTQLQNEKLYLYYLQNGRDMYVDQELDINRLSDYDVDHIVPQSFLKDDSIDNKVLTRSDKNRGKSDNVPSEEVVKKMKNYWRQLLNAKLITQRKFDNLTKAERGGLSELDKAGFIKRQLVETRQITKHVAQILDSRMNTKYDENDKLIREVKVITLKSKLVSDFRKDFQFYKVREINNYHHAHDAYLNAVVGTALIKKYPKLESEFVYGDYKVYDVRKMIAKSEQEIGKATAKYFFYSNIMNFFKTEITLANGEIRKRPLIETNGETGEIVWDKGRDFATVRKVLSMPQVNIVKKTEVQTGGFSKESILPKRNSDKLIARKKDWDPKKYGGFDSPTVAYSVLVVAKVEKGKSKKLKSVKELLGITIMERSSFEKNPIDFLEAKGYKEVKKDLIIKLPKYSLFELENGRKRMLASAGELQKGNELALPSKYVNFLYLASHYEKLKGGSSGSETPGTSESATPESSGSEVEFSHEYWMRHALTLAKRARDEREVPVGAVLVLNNRVIGEGWNRAIGLHDPTAHAEIMALRQGGLVMQNYRLIDATLYVTFEPCVMCAGAMIHSRIGRVVFGVRNAKTGAAGSLMDVLHYPGMNHRVEITEGILADECAALLCYFFRMPRQVFNAQKKAQSSTDSPEDNEQKQLFVEQHKHYLDEIIEQISEFSKRVILADANLDKVLSAYNKHRDKPIREQAENIIHLFTLTNLGAPAAFKYFDTTIDRKRYTSTKEVLDATLIHQSITGLYETRIDLSQLGGD

SEQ ID NO: 144 - protein, 1554 aa, Artificial Sequence
  Description of Artificial Sequence: Synthetic polypeptide
MDKKYSIGLAIGTNSVGWAVITDEYKVPSKKFKVLGNTDRHSIKKNLIGALLFDSGETAEATRLKRTARRRYTRRKNRICYLQEIFSNEMAKVDDSFFHRLEESFLVEEDKKHERHPIFGNIVDEVAYHEKYPTIYHLRKKLVDSTDKADLRLIYLALAHMIKFRGHFLIEGDLNPDNSDVDKLFIQLVQTYNQLFEENPINASGVDAKAILSARLSKSRRLENLIAQLPGEKKNGLFGNLIALSLGLTPNFKSNFDLAEDAKLQLSKDTYDDDLDNLLAQIGDQYADLFLAAKNLSDAILLSDILRVNTEITKAPLSASMIKRYDEHHQDLTLLKALVRQQLPEKYKEIFFDQSKNGYAGYIDGGASQEEFYKFIKPILEKMDGTEELLVKLNREDLLRKQRTFDNGSIPHQIHLGELHAILRRQEDFYPFLKDNREKIEKILTFRIPYYVGPLARGNSRFAWMTRKSEETITPWNFEEVVDKGASAQSFIERMTNFDKNLPNEKVLPKHSLLYEYFTVYNELTKVKYVTEGMRKPAFLSGEQKKAIVDLLFKTNRKVTVKQLKEDYFKKIECFDSVEISGVEDRFNASLGTYHDLLKIIKDKDFLDNEENEDILEDIVLTLTLFEDREMIEERLKTYAHLFDDKVMKQLKRRRYTGWGRLSRKLINGIRDKQSGKTILDFLKSDGFANRNFMQLIHDDSLTFKEDIQKAQVSGQGDSLHEHIANLAGSPAIKKGILQTVKVVDELVKVMGRHKPENIVIEMARENQTTQKGQKNSRERMKRIEEGIKELGSQILKEHPVENTQLQNEKLYLYYLQNGRDMYVDQELDINRLSDYDVDHIVPQSFLKDDSIDNKVLTRSDKNRGKSDNVPSEEVVKKMKNYWRQLLNAKLITQRKFDNLTKAERGGLSELDKAGFIKRQLVETRQITKHVAQILDSRMNTKYDENDKLIREVKVITLKSKLVSDFRKDFQFYKVREINNYHHAHDAYLNAVVGTALIKKYPKLESEFVYGDYKVYDVRKMIAKSEQEIGKATAKYFFYSNIMNFFKTEITLANGSSGSETPGTSESATPESSGSEVEFSHEYWMRHALTLAKRARDEREVPVGAVLVLNNRVIGEGWNRAIGLHDPTAHAEIMALRQGGLVMQNYRLIDATLYVTFEPCVMCAGAMIHSRIGRVVFGVRNAKTGAAGSLMDVLHYPGMNHRVEITEGILADECAALLCYFFRMPRQVFNAQKKAQSSTDGEIRKRPLIETNGETGEIVWDKGRDFATVRKVLSMPQVNIVKKTEVQTGGFSKESILPKRNSDKLIARKKDWDPKKYGGFDSPTVAYSVLVVAKVEKGKSKKLKSVKELLGITIMERSSFEKNPIDFLEAKGYKEVKKDLIIKLPKYSLFELENGRKRMLASAGELQKGNELALPSKYVNFLYLASHYEKLKGSPEDNEQKQLFVEQHKHYLDEIIEQISEFSKRVILADANLDKVLSAYNKHRDKPIREQAENIIHLFTLTNLGAPAAFKYFDTTIDRKRYTSTKEVLDATLIHQSITGLYETRIDLSQLGGD

SEQ ID NO: 145 - protein, 1554 aa, Artificial Sequence
  Description of Artificial Sequence: Synthetic polypeptide
MDKKYSIGLAIGTNSVGWAVITDEYKVPSKKFKVLGNTDRHSIKKNLIGALLFDSGETAEATRLKRTARRRYTRRKNRICYLQEIFSNEMAKVDDSFFHRLEESFLVEEDKKHERHPIFGNIVDEVAYHEKYPTIYHLRKKLVDSTDKADLRLIYLALAHMIKFRGHFLIEGDLNPDNSDVDKLFIQLVQTYNQLFEENPINASGVDAKAILSARLSKSRRLENLIAQLPGEKKNGLFGNLIALSLGLTPNFKSNFDLAEDAKLQLSKDTYDDDLDNLLAQIGDQYADLFLAAKNLSDAILLSDILRVNTEITKAPLSASMIKRYDEHHQDLTLLKALVRQQLPEKYKEIFFDQSKNGYAGYIDGGASQEEFYKFIKPILEKMDGTEELLVKLNREDLLRKQRTFDNGSIPHQIHLGELHAILRRQEDFYPFLKDNREKIEKILTFRIPYYVGPLARGNSRFAWMTRKSEETITPWNFEEVVDKGASAQSFIERMTNFDKNLPNEKVLPKHSLLYEYFTVYNELTKVKYVTEGMRKPAFLSGEQKKAIVDLLFKTNRKVTVKQLKEDYFKKIECFDSVEISGVEDRFNASLGTYHDLLKIIKDKDFLDNEENEDILEDIVLTLTLFEDREMIEERLKTYAHLFDDKVMKQLKRRRYTGWGRLSRKLINGIRDKQSGKTILDFLKSDGFANRNFMQLIHDDSLTFKEDIQKAQVSGQGDSLHEHIANLAGSPAIKKGILQTVKVVDELVKVMGRHKPENIVIEMARENQTTQKGQKNSRERMKRIEEGIKELGSQILKEHPVENTQLQNEKLYLYYLQNGRDMYVDQELDINRLSDYDVDHIVPQSFLKDDSIDNKVLTRSDKNRGKSDNVPSEEVVKKMKNYWRQLLNAKLITQRKFDNLTKAERGGLSELDKAGFIKRQLVETRQITKHVAQILDSRMNTKYDENDKLIREVKVITLKSKLVSDFRKDFQFYKVREINNYHHAHDAYLNAVVGTALIKKYPKLESEFVYGDYKVYDVRKMIAKSEGSSGSETPGTSESATPESSGSEVEFSHEYWMRHALTLAKRARDEREVPVGAVLVLNNRVIGEGWNRAIGLHDPTAHAEIMALRQGGLVMQNYRLIDATLYVTFEPCVMCAGAMIHSRIGRVVFGVRNAKTGAAGSLMDVLHYPGMNHRVEITEGILADECAALLCYFFRMPRQVFNAQKKAQSSTDQEIGKATAKYFFYSNIMNFFKTEITLANGEIRKRPLIETNGETGEIVWDKGRDFATVRKVLSMPQVNIVKKTEVQTGGFSKESILPKRNSDKLIARKKDWDPKKYGGFDSPTVAYSVLVVAKVEKGKSKKLKSVKELLGITIMERSSFEKNPIDFLEAKGYKEVKKDLIIKLPKYSLFELENGRKRMLASAGELQKGNELALPSKYVNFLYLASHYEKLKGSPEDNEQKQLFVEQHKHYLDEIIEQISEFSKRVILADANLDKVLSAYNKHRDKPIREQAENIIHLFTLTNLGAPAAFKYFDTTIDRKRYTSTKEVLDATLIHQSITGLYETRIDLSQLGGD

SEQ ID NO: 146 - protein, 1540 aa, Artificial Sequence
  Description of Artificial Sequence: Synthetic polypeptide
MDKKYSIGLAIGTNSVGWAVITDEYKVPSKKFKVLGNTDRHSIKKNLIGALLFDSGETAEATRLKRTARRRYTRRKNRICYLQEIFSNEMAKVDDSFFHRLEESFLVEEDKKHERHPIFGNIVDEVAYHEKYPTIYHLRKKLVDSTDKADLRLIYLALAHMIKFRGHFLIEGDLNPDNSDVDKLFIQLVQTYNQLFEENPINASGVDAKAILSARLSKSRRLENLIAQLPGEKKNGLFGNLIALSLGLTPNFKSNFDLAEDAKLQLSKDTYDDDLDNLLAQIGDQYADLFLAAKNLSDAILLSDILRVNTEITKAPLSASMIKRYDEHHQDLTLLKALVRQQLPEKYKEIFFDQSKNGYAGYIDGGASQEEFYKFIKPILEKMDGTEELLVKLNREDLLRKQRTFDNGSIPHQIHLGELHAILRRQEDFYPFLKDNREKIEKILTFRIPYYVGPLARGNSRFAWMTRKSEETITPWNFEEVVDKGASAQSFIERMTNFDKNLPNEKVLPKHSLLYEYFTVYNELTKVKYVTEGMRKPAFLSGEQKKAIVDLLFKTNRKVTVKQLKEDYFKKIECFDSVEISGVEDRFNASLGTYHDLLKIIKDKDFLDNEENEDILEDIVLTLTLFEDREMIEERLKTYAHLFDDKVMKQLKRRRYTGWGRLSRKLINGIRDKQSGKTILDFLKSDGFANRNFMQLIHDDSLTFKEDIQKAQVSGQGDSLHEHIANLAGSPAIKKGILQTVKVVDELVKVMGRHKPENIVIEMARENQGSSGSETPGTSESATPESSGSEVEFSHEYWMRHALTLAKRARDEREVPVGAVLVLNNRVIGEGWNRAIGLHDPTAHAEIMALRQGGLVMQNYRLIDATLYVTFEPCVMCAGAMIHSRIGRVVFGVRNAKTGAAGSLMDVLHYPGMNHRVEITEGILADECAALLCYFFRMPRTTQKGQKNSRERMKRIEEGIKELGSQILKEHPVENTQLQNEKLYLYYLQNGRDMYVDQELDINRLSDYDVDHIVPQSFLKDDSIDNKVLTRSDKNRGKSDNVPSEEVVKKMKNYWRQLLNAKLITQRKFDNLTKAERGGLSELDKAGFIKRQLVETRQITKHVAQILDSRMNTKYDENDKLIREVKVITLKSKLVSDFRKDFQFYKVREINNYHHAHDAYLNAVVGTALIKKYPKLESEFVYGDYKVYDVRKMIAKSEQEIGKATAKYFFYSNIMNFFKTEITLANGEIRKRPLIETNGETGEIVWDKGRDFATVRKVLSMPQVNIVKKTEVQTGGFSKESILPKRNSDKLIARKKDWDPKKYGGFDSPTVAYSVLVVAKVEKGKSKKLKSVKELLGITIMERSSFEKNPIDFLEAKGYKEVKKDLIIKLPKYSLFELENGRKRMLASAGELQKGNELALPSKYVNFLYLASHYEKLKGSPEDNEQKQLFVEQHKHYLDEIIEQISEFSKRVILADANLDKVLSAYNKHRDKPIREQAENIIHLFTLTNLGAPAAFKYFDTTIDRKRYTSTKEVLDATLIHQSITGLYETRIDLSQLGGD

SEQ ID NO: 147 - protein, 1540 aa, Artificial Sequence
  Description of Artificial Sequence: Synthetic polypeptide
MDKKYSIGLAIGTNSVGWAVITDEYKVPSKKFKVLGNTDRHSIKKNLIGALLFDSGETAEATRLKRTARRRYTRRKNRICYLQEIFSNEMAKVDDSFFHRLEESFLVEEDKKHERHPIFGNIVDEVAYHEKYPTIYHLRKKLVDSTDKADLRLIYLALAHMIKFRGHFLIEGDLNPDNSDVDKLFIQLVQTYNQLFEENPINASGVDAKAILSARLSKSRRLENLIAQLPGEKKNGLFGNLIALSLGLTPNFKSNFDLAEDAKLQLSKDTYDDDLDNLLAQIGDQYADLFLAAKNLSDAILLSDILRVNTEITKAPLSASMIKRYDEHHQDLTLLKALVRQQLPEKYKEIFFDQSKNGYAGYIDGGASQEEFYKFIKPILEKMDGTEELLVKLNREDLLRKQRTFDNGSIPHQIHLGELHAILRRQEDFYPFLKDNREKIEKILTFRIPYYVGPLARGNSRFAWMTRKSEETITPWNFEEVVDKGASAQSFIERMTNFDKNLPNEKVLPKHSLLYEYFTVYNELTKVKYVTEGMRKPAFLSGEQKKAIVDLLFKTNRKVTVKQLKEDYFKKIECFDSVEISGVEDRFNASLGTYHDLLKIIKDKDFLDNEENEDILEDIVLTLTLFEDREMIEERLKTYAHLFDDKVMKQLKRRRYTGWGRLSRKLINGIRDKQSGKTILDFLKSDGFANRNFMQLIHDDSLTFKEDIQKAQVSGQGDSLHEHIANLAGSPAIKKGILQTVKVVDELVKVMGRHKPENIVIEMARENQTTQKGQKNSRERMKRIEEGIKELGSQILKEHPVENTQLQNEKLYLYYLQNGRDMYVDQELDINRLSDYDVDHIVPQSFLKDDSIDNKVLTRSDKNRGKSDNVPSEEVVKKMKNYWRQLLNAKLITQRKFDNLTKAERGGLSELDKAGFIKRQLVETRQITKHVAQILDSRMNTKYDENDKLIREVKVITLKSKLVSDFRKDFQFYKVREINNYHHAHDAYLNAVVGTALIKKYPKLESEFVYGDYKVYDVRKMIAKSEQEIGKATAKYFFYSNIMNFFKTEITLANGEIRKRPLIETNGETGEIVWDKGRDFATVRKVLSMPQVNIVKKTEVQTGGFSKESILPKRNSDKLIARKKDWDPKKYGGFDSPTVAYSVLVVAKVEKGKSKKLKSVKELLGITIMERSSFEKNPIDFLEAKGYKEVKKDLIIKLPKYSLFELENGRKRMLASAGELQKGNELALPSKYVNFLYLASHYEKLKGSPGSSGSETPGTSESATPESSGSEVEFSHEYWMRHALTLAKRARDEREVPVGAVLVLNNRVIGEGWNRAIGLHDPTAHAEIMALRQGGLVMQNYRLIDATLYVTFEPCVMCAGAMIHSRIGRVVFGVRNAKTGAAGSLMDVLHYPGMNHRVEITEGILADECAALLCYFFRMPREDNEQKQLFVEQHKHYLDEIIEQISEFSKRVILADANLDKVLSAYNKHRDKPIREQAENIIHLFTLTNLGAPAAFKYFDTTIDRKRYTSTKEVLDATLIHQSITGLYETRIDLSQLGGD

SEQ ID NO: 148 - protein, 1543 aa, Artificial Sequence
  Description of Artificial Sequence: Synthetic polypeptide
MDKKYSIGLAIGTNSVGWAVITDEYKVPSKKFKVLGNTDRHSIKKNLIGALLFDSGETAEATRLKRTARRRYTRRKNRICYLQEIFSNEMAKVDDSFFHRLEESFLVEEDKKHERHPIFGNIVDEVAYHEKYPTIYHLRKKLVDSTDKADLRLIYLALAHMIKFRGHFLIEGDLNPDNSDVDKLFIQLVQTYNQLFEENPINASGVDAKAILSARLSKSRRLENLIAQLPGEKKNGLFGNLIALSLGLTPNFKSNFDLAEDAKLQLSKDTYDDDLDNLLAQIGDQYADLFLAAKNLSDAILLSDILRVNTEITKAPLSASMIKRYDEHHQDLTLLKALVRQQLPEKYKEIFFDQSKNGYAGYIDGGASQEEFYKFIKPILEKMDGTEELLVKLNREDLLRKQRTFDNGSIPHQIHLGELHAILRRQEDFYPFLKDNREKIEKILTFRIPYYVGPLARGNSRFAWMTRKSEETITPWNFEEVVDKGASAQSFIERMTNFDKNLPNEKVLPKHSLLYEYFTVYNELTKVKYVTEGMRKPAFLSGEQKKAIVDLLFKTNRKVTVKQLKEDYFKKIECFDSVEISGVEDRFNASLGTYHDLLKIIKDKDFLDNEENEDILEDIVLTLTLFEDREMIEERLKTYAHLFDDKVMKQLKRRRYTGWGRLSRKLINGIRDKQSGKTILDFLKSDGFANRNFMQLIHDDSLTFKEDIQKAQVSGQGDSLHEHIANLAGSPAIKKGILQTVKVVDELVKVMGRHKPENIVIEMARENQTTQKGQKNSRERMKRIEEGIKELGSQILKEHPVENTQLQNEKLYLYYLQNGRDMYVDQELDINRLSDYDVDHIVPQSFLKDDSIDNKVLTRSDKNRGKSDNVPSEEVVKKMKNYWRQLLNAKLITQRKFDNLTKAERGGLSELDKAGFIKRQLVETRQITKHVAQILDSRMNTKYDENDKLIREVKVITLKSKLVSDFRKDFQFYKVREINNYHHAHDAYLNAVVGTALIKKYPKLESEFVYGDYKVYDVRKMIAKSEQEIGKATAKYFFYSNIMNFFKTEITLANGEIRKRPLIETNGETGEIVWDKGRDFATVRKVLSMPQVNIVKKTEVQTGGFSKESILPKRNSDKLIARKKDWDPKKYGGFDSPTVAYSVLVVAKVEKGKSKKLKSVKELLGITIMERSSFEKNPIDFLEAKGYKEVKKDLIIKLPKYSLFELENGRKRMLASAGELQKGNELALPSKYVNFLYLASHYEKLKGSPGSSGSSGSETPGTSESATPESSGSEVEFSHEYWMRHALTLAKRARDEREVPVGAVLVLNNRVIGEGWNRAIGLHDPTAHAEIMALRQGGLVMQNYRLIDATLYVTFEPCVMCAGAMIHSRIGRVVFGVRNAKTGAAGSLMDVLHYPGMNHRVEITEGILADECAALLCYFFRMPREDNEQKQLFVEQHKHYLDEIIEQISEFSKRVILADANLDKVLSAYNKHRDKPIREQAENIIHLFTLTNLGAPAAFKYFDTTIDRKRYTSTKEVLDATLIHQSITGLYETRIDLSQLGGD

SEQ ID NO: 149 - protein, 1546 aa, Artificial Sequence
  Description of Artificial Sequence: Synthetic polypeptide
MDKKYSIGLAIGTNSVGWAVITDEYKVPSKKFKVLGNTDRHSIKKNLIGALLFDSGETAEATRLKRTARRRYTRRKNRICYLQEIFSNEMAKVDDSFFHRLEESFLVEEDKKHERHPIFGNIVDEVAYHEKYPTIYHLRKKLVDSTDKADLRLIYLALAHMIKFRGHFLIEGDLNPDNSDVDKLFIQLVQTYNQLFEENPINASGVDAKAILSARLSKSRRLENLIAQLPGEKKNGLFGNLIALSLGLTPNFKSNFDLAEDAKLQLSKDTYDDDLDNLLAQIGDQYADLFLAAKNLSDAILLSDILRVNTEITKAPLSASMIKRYDEHHQDLTLLKALVRQQLPEKYKEIFFDQSKNGYAGYIDGGASQEEFYKFIKPILEKMDGTEELLVKLNREDLLRKQRTFDNGSIPHQIHLGELHAILRRQEDFYPFLKDNREKIEKILTFRIPYYVGPLARGNSRFAWMTRKSEETITPWNFEEVVDKGASAQSFIERMTNFDKNLPNEKVLPKHSLLYEYFTVYNELTKVKYVTEGMRKPAFLSGEQKKAIVDLLFKTNRKVTVKQLKEDYFKKIECFDSVEISGVEDRFNASLGTYHDLLKIIKDKDFLDNEENEDILEDIVLTLTLFEDREMIEERLKTYAHLFDDKVMKQLKRRRYTGWGRLSRKLINGIRDKQSGKTILDFLKSDGFANRNFMQLIHDDSLTFKEDIQKAQVSGQGDSLHEHIANLAGSPAIKKGILQTVKVVDELVKVMGRHKPENIVIEMARENQTTQKGQKNSRERMKRIEEGIKELGSQILKEHPVENTQLQNEKLYLYYLQNGRDMYVDQELDINRLSDYDVDHIVPQSFLKDDSIDNKVLTRSDKNRGKSDNVPSEEVVKKMKNYWRQLLNAKLITQRKFDNLTKAERGGLSELDKAGFIKRQLVETRQITKHVAQILDSRMNTKYDENDKLIREVKVITLKSKLVSDFRKDFQFYKVREINNYHHAHDAYLNAVVGTALIKKYPKLESEFVYGDYKVYDVRKMIAKSEQEIGKATAKYFFYSNIMNFFKTEITLANGEIRKRPLIETNGETGEIVWDKGRDFATVRKVLSMPQVNIVKKTEVQTGGFSKESILPKRNSDKLIARKKDWDPKKYGGFDSPTVAYSVLVVAKVEKGKSKKLKSVKELLGITIMERSSFEKNPIDFLEAKGYKEVKKDLIIKLPKYSLFELENGRKRMLASAGELQKGNELALPSKYVNFLYLASHYEKLKGSPGSSGSSGSETPGTSESATPESGSSSGSEVEFSHEYWMRHALTLAKRARDEREVPVGAVLVLNNRVIGEGWNRAIGLHDPTAHAEIMALRQGGLVMQNYRLIDATLYVTFEPCVMCAGAMIHSRIGRVVFGVRNAKTGAAGSLMDVLHYPGMNHRVEITEGILADECAALLCYFFRMPREDNEQKQLFVEQHKHYLDEIIEQISEFSKRVILADANLDKVLSAYNKHRDKPIREQAENIIHLFTLTNLGAPAAFKYFDTTIDRKRYTSTKEVLDATLIHQSITGLYETRIDLSQLGGD

SEQ ID NO: 150 - protein, 1546 aa, Artificial Sequence
  Description of Artificial Sequence: Synthetic polypeptide
MDKKYSIGLAIGTNSVGWAVITDEYKVPSKKFKVLGNTDRHSIKKNLIGALLFDSGETAEATRLKRTARRRYTRRKNRICYLQEIFSNEMAKVDDSFFHRLEESFLVEEDKKHERHPIFGNIVDEVAYHEKYPTIYHLRKKLVDSTDKADLRLIYLALAHMIKFRGHFLIEGDLNPDNSDVDKLFIQLVQTYNQLFEENPINASGVDAKAILSARLSKSRRLENLIAQLPGEKKNGLFGNLIALSLGLTPNFKSNFDLAEDAKLQLSKDTYDDDLDNLLAQIGDQYADLFLAAKNLSDAILLSDILRVNTEITKAPLSASMIKRYDEHHQDLTLLKALVRQQLPEKYKEIFFDQSKNGYAGYIDGGASQEEFYKFIKPILEKMDGTEELLVKLNREDLLRKQRTFDNGSIPHQIHLGELHAILRRQEDFYPFLKDNREKIEKILTFRIPYYVGPLARGNSRFAWMTRKSEETITPWNFEEVVDKGASAQSFIERMTNFDKNLPNEKVLPKHSLLYEYFTVYNELTKVKYVTEGMRKPAFLSGEQKKAIVDLLFKTNRKVTVKQLKEDYFKKIECFDSVEISGVEDRFNASLGTYHDLLKIIKDKDFLDNEENEDILEDIVLTLTLFEDREMIEERLKTYAHLFDDKVMKQLKRRRYTGWGRLSRKLINGIRDKQSGKTILDFLKSDGFANRNFMQLIHDDSLTFKEDIQKAQVSGQGDSLHEHIANLAGSPAIKKGILQTVKVVDELVKVMGRHKPENIVIEMARENQTTQKGQKNSRERMKRIEEGIKELGSQILKEHPVENTQLQNEKLYLYYLQNGRDMYVDQELDINRLSDYDVDHIVPQSFLKDDSIDNKVLTRSDKNRGKSDNVPSEEVVKKMKNYWRQLLNAKLITQRKFDNLTKAERGGLSELDKAGFIKRQLVETRQITKHVAQILDSRMNTKYDENDKLIREVKVITLKSKLVSDFRKDFQFYKVREINNYHHAHDAYLNAVVGTALIKKYPKLESEFVYGDYKVYDVRKMIAKSEQEIGKATAKYFFYSNIMNFFKTEITLANGEIRKRPLIETNGETGEIVWDKGRDFATVRKVLSMPQVNIVKKTEVQTGGFSKESILPKRNSDKLIARKKDWDPKKYGGFDSPTVAYSVLVVAKVEKGKSKKLKSVKELLGITIMERSSFEKNPIDFLEAKGYKEVKKDLIIKLPKYSLFELENGRKRMLASAGELQKGNELALPSKYVNFLYLASHYEKLKGSPGSSGSSGSETPGTSESATPESGSSSGSEVEFSHEYWMRHALTLAKRARDEREVPVGAVLVLNNRVIGEGWNRAIGLHDPTAHAEIMALRQGGLVMQNYRLIDATLYVTFEPCVMCAGAMIHSRIGRVVFGVRNAKTGAAGSLMDVLHYPGMNHRVEITEGILADECAALLCYFFRMRREDNEQKQLFVEQHKHYLDEIIEQISEFSKRVILADANLDKVLSAYNKHRDKPIREQAENIIHLFTLTNLGAPAAFKYFDTTIDRKRYTSTKEVLDATLIHQSITGLYETRIDLSQLGGD

SEQ ID NO: 151 - protein, 1546 aa, Artificial Sequence
  Description of Artificial Sequence: Synthetic polypeptide
MDKKYSIGLAIGTNSVGWAVITDEYKVPSKKFKVLGNTDRHSIKKNLIGALLFDSGETAEATRLKRTARRRYTRRKNRICYLQEIFSNEMAKVDDSFFHRLEESFLVEEDKKHERHPIFGNIVDEVAYHEKYPTIYHLRKKLVDSTDKADLRLIYLALAHMIKFRGHFLIEGDLNPDNSDVDKLFIQLVQTYNQLFEENPINASGVDAKAILSARLSKSRRLENLIAQLPGEKKNGLFGNLIALSLGLTPNFKSNFDLAEDAKLQLSKDTYDDDLDNLLAQIGDQYADLFLAAKNLSDAILLSDILRVNTEITKAPLSASMIKRYDEHHQDLTLLKALVRQQLPEKYKEIFFDQSKNGYAGYIDGGASQEEFYKFIKPILEKMDGTEELLVKLNREDLLRKQRTFDNGSIPHQIHLGELHAILRRQEDFYPFLKDNREKIEKILTFRIPYYVGPLARGNSRFAWMTRKSEETITPWNFEEVVDKGASAQSFIERMTNFDKNLPNEKVLPKHSLLYEYFTVYNELTKVKYVTEGMRKPAFLSGEQKKAIVDLLFKTNRKVTVKQLKEDYFKKIECFDSVEISGVEDRFNASLGTYHDLLKIIKDKDFLDNEENEDILEDIVLTLTLFEDREMIEERLKTYAHLFDDKVMKQLKRRRYTGWGRLSRKLINGIRDKQSGKTILDFLKSDGFANRNFMQLIHDDSLTFKEDIQKAQVSGQGDSLHEHIANLAGSPAIKKGILQTVKVVDELVKVMGRHKPENIVIEMARENQTTQKGQKNSRERMKRIEEGIKELGSQILKEHPVENTQLQNEKLYLYYLQNGRDMYVDQELDINRLSDYDVDHIVPQSFLKDDSIDNKVLTRSDKNRGKSDNVPSEEVVKKMKNYWRQLLNAKLITQRKFDNLTKAERGGLSELDKAGFIKRQLVETRQITKHVAQILDSRMNTKYDENDKLIREVKVITLKSKLVSDFRKDFQFYKVREINNYHHAHDAYLNAVVGTALIKKYPKLESEFVYGDYKVYDVRKMIAKSEQEIGKATAKYFFYSNIMNFFKTEITLANGEIRKRPLIETNGETGEIVWDKGRDFATVRKVLSMPQVNIVKKTEVQTGGFSKESILPKRNSDKLIARKKDWDPKKYGGFDSPTVAYSVLVVAKVEKGKSKKLKSVKELLGITIMERSSFEKNPIDFLEAKGYKEVKKDLIIKLPKYSLFELENGRKRMLASAGELQKGNELALPSKYVNFLYLASHYEKLKGSGSSGSSGSETPGTSESATPESGSSSGSEVEFSHEYWMRHALTLAKRARDEREVPVGAVLVLNNRVIGEGWNRAIGLHDPTAHAEIMALRQGGLVMQNYRLIDATLYVTFEPCVMCAGAMIHSRIGRVVFGVRNAKTGAAGSLMDVLHYPGMNHRVEITEGILADECAALLCYFFRMRRPEDNEQKQLFVEQHKHYLDEIIEQISEFSKRVILADANLDKVLSAYNKHRDKPIREQAENIIHLFTLTNLGAPAAFKYFDTTIDRKRYTSTKEVLDATLIHQSITGLYETRIDLSQLGGD

SEQ ID NO: 152 - protein, 1551 aa, Artificial Sequence
  Description of Artificial Sequence: Synthetic polypeptide
MDKKYSIGLAIGTNSVGWAVITDEYKVPSKKFKVLGNTDRHSIKKNLIGALLFDSGETAEATRLKRTARRRYTRRKNRICYLQEIFSNEMAKVDDSFFHRLEESFLVEEDKKHERHPIFGNIVDEVAYHEKYPTIYHLRKKLVDSTDKADLRLIYLALAHMIKFRGHFLIEGDLNPDNSDVDKLFIQLVQTYNQLFEENPINASGVDAKAILSARLSKSRRLENLIAQLPGEKKNGLFGNLIALSLGLTPNFKSNFDLAEDAKLQLSKDTYDDDLDNLLAQIGDQYADLFLAAKNLSDAILLSDILRVNTEITKAPLSASMIKRYDEHHQDLTLLKALVRQQLPEKYKEIFFDQSKNGYAGYIDGGASQEEFYKFIKPILEKMDGTEELLVKLNREDLLRKQRTFDNGSIPHQIHLGELHAILRRQEDFYPFLKDNREKIEKILTFRIPYYVGPLARGNSRFAWMTRKSEETITPWNFEEVVDKGASAQSFIERMTNFDKNLPNEKVLPKHSLLYEYFTVYNELTKVKYVTEGMRKPAFLSGEQKKAIVDLLFKTNRKVTVKQLKEDYFKKIECFDSVEISGVEDRFNASLGTYHDLLKIIKDKDFLDNEENEDILEDIVLTLTLFEDREMIEERLKTYAHLFDDKVMKQLKRRRYTGWGRLSRKLINGIRDKQSGKTILDFLKSDGFANRNFMQLIHDDSLTFKEDIQKAQVSGQGDSLHEHIANLAGSPAIKKGILQTVKVVDELVKVMGRHKPENIVIEMARENQTTQKGQKNSRERMKRIEEGIKELGSQILKEHPVENTQLQNEKLYLYYLQNGRDMYVDQELDINRLSDYDVDHIVPQSFLKDDSIDNKVLTRSDKNRGKSDNVPSEEVVKKMKNYWRQLLNAKLITQRKFDNLTKAERGGLSELDKAGFIKRQLVETRQITKHVAQILDSRMNTKYDENDKLIREVKVITLKSKLVSDFRKDFQFYKVREINNYHHAHDAYLNAVVGTALIKKYPKLESEFVYGDYKVYDVRKMIAKSEQEIGKATAKYFFYSNIMNFFKTEITLANGEIRKRPLIETNGETGEIVWDKGRDFATVRKVLSMPQVNIVKKTEVQTGGFSKESILPKRNSDKLIARKKDWDPKKYGGFDSPTVAYSVLVVAKVEKGKSKKLKSVKELLGITIMERSSFEKNPIDFLEAKGYKEVKKDLIIKLPKYSLFELENGRKRMLASAGELQKGNELALPSKYVNFLYLASHYEKLKGSPGSSGSSGSETPGTSESATPESGSSGSEVEFSHEYWMRHALTLAKRARDEREVPVGAVLVLNNRVIGEGWNRAHAEIMALRQGGLVMQNYRLIDATLYVTFEPCVMCAGAMIHSRIGRVVFGVRNAKTGAAGSLMDVLHYPGMNHRVEITEGILADECAALLCYFFRMPRQVFNAQKKAQSSTDEDNEQKQLFVEQHKHYLDEIIEQISEFSKRVILADANLDKVLSAYNKHRDKPIREQAENIIHLFTLTNLGAPAAFKYFDTTIDRKRYTSTKEVLDATLIHQSITGLYETRIDLSQLGGD

SEQ ID NO: 153 - protein, 1546 aa, Artificial Sequence
  Description of Artificial Sequence: Synthetic polypeptide
MDKKYSIGLAIGTNSVGWAVITDEYKVPSKKFKVLGNTDRHSIKKNLIGALLFDSGETAEATRLKRTARRRYTRRKNRICYLQEIFSNEMAKVDDSFFHRLEESFLVEEDKKHERHPIFGNIVDEVAYHEKYPTIYHLRKKLVDSTDKADLRLIYLALAHMIKFRGHFLIEGDLNPDNSDVDKLFIQLVQTYNQLFEENPINASGVDAKAILSARLSKSRRLENLIAQLPGEKKNGLFGNLIALSLGLTPNFKSNFDLAEDAKLQLSKDTYDDDLDNLLAQIGDQYADLFLAAKNLSDAILLSDILRVNTEITKAPLSASMIKRYDEHHQDLTLLKALVRQQLPEKYKEIFFDQSKNGYAGYIDGGASQEEFYKFIKPILEKMDGTEELLVKLNREDLLRKQRTFDNGSIPHQIHLGELHAILRRQEDFYPFLKDNREKIEKILTFRIPYYVGPLARGNSRFAWMTRKSEETITPWNFEEVVDKGASAQSFIERMTNFDKNLPNEKVLPKHSLLYEYFTVYNELTKVKYVTEGMRKPAFLSGEQKKAIVDLLFKTNRKVTVKQLKEDYFKKIECFDSVEISGVEDRFNASLGTYHDLLKIIKDKDFLDNEENEDILEDIVLTLTLFEDREMIEERLKTYAHLFDDKVMKQLKRRRYTGWGRLSRKLINGIRDKQSGKTILDFLKSDGFANRNFMQLIHDDSLTFKEDIQKAQVSGQGDSLHEHIANLAGSPAIKKGILQTVKVVDELVKVMGRHKPENIVIEMARENQTTQKGQKNSRERMKRIEEGIKELGSQILKEHPVENTQLQNEKLYLYYLQNGRDMYVDQELDINRLSDYDVDHIVPQSFLKDDSIDNKVLTRSDKNRGKSDNVPSEEVVKKMKNYWRQLLNAKLITQRKFDNLTKAERGGLSELDKAGFIKRQLVETRQITKHVAQILDSRMNTKYDENDKLIREVKVITLKSKLVSDFRKDFQFYKVREINNYHHAHDAYLNAVVGTALIKKYPKLESEFVYGDYKVYDVRKMIAKSEQEIGKATAKYFFYSNIMNFFKTEITLANGEIRKRPLIETNGETGEIVWDKGRDFATVRKVLSMPQVNIVKKTEVQTGGFSKESILPKRNSDKLIARKKDWDPKKYGGFDSPTVAYSVLVVAKVEKGKSKKLKSVKELLGITIMERSSFEKNPIDFLEAKGYKEVKKDLIIKLPKYSLFELENGRKRMLASAGELQKGNELALPSKYVNFLYLASHYEKLKGSPEGSSGSSGSETPGTSESATPESGSSSGSEVEFSHEYWMRHALTLAKRARDEREVPVGAVLVLNNRVIGEGWNRAIGLHDPTAHAEIMALRQGGLVMQNYRLIDATLYVTFEPCVMCAGAMIHSRIGRVVFGVRNAKTGAAGSLMDVLHYPGMNHRVEITEGILADECAALLCYFFRMRRDNEQKQLFVEQHKHYLDEIIEQISEFSKRVILADANLDKVLSAYNKHRDKPIREQAENIIHLFTLTNLGAPAAFKYFDTTIDRKRYTSTKEVLDATLIHQSITGLYETRIDLSQLGGD

SEQ ID NO: 154 - protein, 1546 aa, Artificial Sequence
  Description of Artificial Sequence: Synthetic polypeptide
MDKKYSIGLAIGTNSVGWAVITDEYKVPSKKFKVLGNTDRHSIKKNLIGALLFDSGETAEATRLKRTARRRYTRRKNRICYLQEIFSNEMAKVDDSFFHRLEESFLVEEDKKHERHPIFGNIVDEVAYHEKYPTIYHLRKKLVDSTDKADLRLIYLALAHMIKFRGHFLIEGDLNPDNSDVDKLFIQLVQTYNQLFEENPINASGVDAKAILSARLSKSRRLENLIAQLPGEKKNGLFGNLIALSLGLTPNFKSNFDLAEDAKLQLSKDTYDDDLDNLLAQIGDQYADLFLAAKNLSDAILLSDILRVNTEITKAPLSASMIKRYDEHHQDLTLLKALVRQQLPEKYKEIFFDQSKNGYAGYIDGGASQEEFYKFIKPILEKMDGTEELLVKLNREDLLRKQRTFDNGSIPHQIHLGELHAILRRQEDFYPFLKDNREKIEKILTFRIPYYVGPLARGNSRFAWMTRKSEETITPWNFEEVVDKGASAQSFIERMTNFDKNLPNEKVLPKHSLLYEYFTVYNELTKVKYVTEGMRKPAFLSGEQKKAIVDLLFKTNRKVTVKQLKEDYFKKIECFDSVEISGVEDRFNASLGTYHDLLKIIKDKDFLDNEENEDILEDIVLTLTLFEDREMIEERLKTYAHLFDDKVMKQLKRRRYTGWGRLSRKLINGIRDKQSGKTILDFLKSDGFANRNFMQLIHDDSLTFKEDIQKAQVSGQGDSLHEHIANLAGSPAIKKGILQTVKVVDELVKVMGRHKPENIVIEMARENQTTQKGQKNSRERMKRIEEGIKELGSQILKEHPVENTQLQNEKLYLYYLQNGRDMYVDQELDINRLSDYDVDHIVPQSFLKDDSIDNKVLTRSDKNRGKSDNVPSEEVVKKMKNYWRQLLNAKLITQRKFDNLTKAERGGLSELDKAGFIKRQLVETRQITKHVAQILDSRMNTKYDENDKLIREVKVITLKSKLVSDFRKDFQFYKVREINNYHHAHDAYLNAVVGTALIKKYPKLESEFVYGDYKVYDVRKMIAKSEQEIGKATAKYFFYSNIMNFFKTEITLANGEIRKRPLIETNGETGEIVWDKGRDFATVRKVLSMPQVNIVKKTEVQTGGFSKESILPKRNSDKLIARKKDWDPKKYGGFDSPTVAYSVLVVAKVEKGKSKKLKSVKELLGITIMERSSFEKNPIDFLEAKGYKEVKKDLIIKLPKYSLFELENGRKRMLASAGELQKGNELALPSKYVNFLYLASHYEKLKGSPEDGSSGSSGSETPGTSESATPESGSSSGSEVEFSHEYWMRHALTLAKRARDEREVPVGAVLVLNNRVIGEGWNRAIGLHDPTAHAEIMALRQGGLVMQNYRLIDATLYVTFEPCVMCAGAMIHSRIGRVVFGVRNAKTGAAGSLMDVLHYPGMNHRVEITEGILADECAALLCYFFRMRRNEQKQLFVEQHKHYLDEIIEQISEFSKRVILADANLDKVLSAYNKHRDKPIREQAENIIHLFTLTNLGAPAAFKYFDTTIDRKRYTSTKEVLDATLIHQSITGLYETRIDLSQLGGD

SEQ ID NO: 155 - protein, 1533 aa, Artificial Sequence
  Description of Artificial Sequence: Synthetic polypeptide
MDKKYSIGLAIGTNSVGWAVITDEYKVPSKKFKVLGNTDRHSIKKNLIGALLFDSGETAEATRLKRTARRRYTRRKNRICYLQEIFSNEMAKVDDSFFHRLEESFLVEEDKKHERHPIFGNIVDEVAYHEKYPTIYHLRKKLVDSTDKADLRLIYLALAHMIKFRGHFLIEGDLNPDNSDVDKLFIQLVQTYNQLFEENPINASGVDAKAILSARLSKSRRLENLIAQLPGEKKNGLFGNLIALSLGLTPNFKSNFDLAEDAKLQLSKDTYDDDLDNLLAQIGDQYADLFLAAKNLSDAILLSDILRVNTEITKAPLSASMIKRYDEHHQDLTLLKALVRQQLPEKYKEIFFDQSKNGYAGYIDGGASQEEFYKFIKPILEKMDGTEELLVKLNREDLLRKQRTFDNGSIPHQIHLGELHAILRRQEDFYPFLKDNREKIEKILTFRIPYYVGPLARGNSRFAWMTRKSEETITPWNFEEVVDKGASAQSFIERMTNFDKNLPNEKVLPKHSLLYEYFTVYNELTKVKYVTEGMRKPAFLSGEQKKAIVDLLFKTNRKVTVKQLKEDYFKKIECFDSVEISGVEDRFNASLGTYHDLLKIIKDKDFLDNEENEDILEDIVLTLTLFEDREMIEERLKTYAHLFDDKVMKQLKRRRYTGWGRLSRKLINGIRDKQSGKTILDFLKSDGFANRNFMQLIHDDSLTFKEDIQKAQVSGQGDSLHEHIANLAGSPAIKKGILQTVKVVDELVKVMGRHKPENIVIEMARENQTTQKGQKNSRERMKRIEEGIKELGSQILKEHPVENTQLQNEKLYLYYLQNGRDMYVDQELDINRLSDYDVDHIVPQSFLKDDSIDNKVLTRSDKNRGKSDNVPSEEVVKKMKNYWRQLLNAKLITQRKFDNLTKAERGGLSELDKAGFIKRQLVETRQITKHVAQILDSRMNTKYDENDKLIREVKVITLKSKLVSDFRKDFQFYKVREINNYHHAHDAYLNAVVGTALIKKYPKLESEFVYGDYKVYDVRKMIAKSEQEIGKATAKYFFYSNIMNFFKTEITLANGEIRKRPLIETNGETGEIVWDKGRDFATVRKVLSMPQVNIVKKTEVQTGGFSKESILPKRNSDKLIARKKDWDPKKYGGFDSPTVAYSVLVVAKVEKGKSKKLKSVKELLGITIMERSSFEKNPIDFLEAKGYKEVKKDLIIKLPKYSLFELENGRKRMLASAGELQKGNELALPSKYVNFLYLASHYEKLKGSPGSSGSETPGTSESATPESSGSEVEFSHEYWMRHALTLAKRARDEREVPVGAVLVLNNRVIGEGWNRAHAEIMALRQGGLVMQNYRLIDATLYVTFEPCVMCAGAMIHSRIGRVVFGVRNAKTGAAGSLMDVLHYPGMNHRVEITEGILADECAALLCYFFRMPRQEDNEQKQLFVEQHKHYLDEIIEQISEFSKRVILADANLDKVLSAYNKHRDKPIREQAENIIHLFTLTNLGAPAAFKYFDTTIDRKRYTSTKEVLDATLIHQSITGLYETRIDLSQLGGD

SEQ ID NO: 156 - protein, 1549 aa, Artificial Sequence
  Description of Artificial Sequence: Synthetic polypeptide
MDKKYSIGLAIGTNSVGWAVITDEYKVPSKKFKVLGNTDRHSIKKNLIGALLFDSGETAEATRLKRTARRRYTRRKNRICYLQEIFSNEMAKVDDSFFHRLEESFLVEEDKKHERHPIFGNIVDEVAYHEKYPTIYHLRKKLVDSTDKADLRLIYLALAHMIKFRGHFLIEGDLNPDNSDVDKLFIQLVQTYNQLFEENPINASGVDAKAILSARLSKSRRLENLIAQLPGEKKNGLFGNLIALSLGLTPNFKSNFDLAEDAKLQLSKDTYDDDLDNLLAQIGDQYADLFLAAKNLSDAILLSDILRVNTEITKAPLSASMIKRYDEHHQDLTLLKALVRQQLPEKYKEIFFDQSKNGYAGYIDGGASQEEFYKFIKPILEKMDGTEELLVKLNREDLLRKQRTFDNGSIPHQIHLGELHAILRRQEDFYPFLKDNREKIEKILTFRIPYYVGPLARGNSRFAWMTRKSEETITPWNFEEVVDKGASAQSFIERMTNFDKNLPNEKVLPKHSLLYEYFTVYNELTKVKYVTEGMRKPAFLSGEQKKAIVDLLFKTNRKVTVKQLKEDYFKKIECFDSVEISGVEDRFNASLGTYHDLLKIIKDKDFLDNEENEDILEDIVLTLTLFEDREMIEERLKTYAHLFDDKVMKQLKRRRYTGWGRLSRKLINGIRDKQSGKTILDFLKSDGFANRNFMQLIHDDSLTFKEDIQKAQVSGQGDSLHEHIANLAGSPAIKKGILQTVKVVDELVKVMGRHKPENIVIEMARENQTTQKGQKNSRERMKRIEEGIKELGSQILKEHPVENTQLQNEKLYLYYLQNGRDMYVDQELDINRLSDYDVDHIVPQSFLKDDSIDNKVLTRSDKNRGKSDNVPSEEVVKKMKNYWRQLLNAKLITQRKFDNLTKAERGGLSELDKAGFIKRQLVETRQITKHVAQILDSRMNTKYDENDKLIREVKVITLKSKLVSDFRKDFQFYKVREINNYHHAHDAYLNAVVGTALSHEYWMRHALTLAKRARDEREVPVGAVLVLNNRVIGEGWNRAIGLHDPTAHAEIMALRQGGLVMQNYRLIDATLYVTFEPCVMCAGAMIHSRIGRVVFGVRNAKTGAAGSLMDVLHYPGMNHRVEITEGILADECAALLCYFFRMPRQVFNAQKKAQSSTDGSSGSETPGTSESATPESSGIKKYPKLESEFVYGDYKVYDVRKMIAKSEQEIGKATAKYFFYSNIMNFFKTEITLANGEIRKRPLIETNGETGEIVWDKGRDFATVRKVLSMPQVNIVKKTEVQTGGFSKESILPKRNSDKLIARKKDWDPKKYGGFDSPTVAYSVLVVAKVEKGKSKKLKSVKELLGITIMERSSFEKNPIDFLEAKGYKEVKKDLIIKLPKYSLFELENGRKRMLASAGELQKGNELALPSKYVNFLYLASHYEKLKGSPEDNEQKQLFVEQHKHYLDEIIEQISEFSKRVILADANLDKVLSAYNKHRDKPIREQAENIIHLFTLTNLGAPAAFKYFDTTIDRKRYTSTKEVLDATLIHQSITGLYETRIDLSQLGGD

SEQ ID NO: 157 - protein, 1555 aa, Artificial Sequence
  Description of Artificial Sequence: Synthetic polypeptide
MDKKYSIGLAIGTNSVGWAVITDEYKVPSKKFKVLGNTDRHSIKKNLIGALLFDSGETAEATRLKRTARRRYTRRKNRICYLQEIFSNEMAKVDDSFFHRLEESFLVEEDKKHERHPIFGNIVDEVAYHEKYPTIYHLRKKLVDSTDKADLRLIYLALAHMIKFRGHFLIEGDLNPDNSDVDKLFIQLVQTYNQLFEENPINASGVDAKAILSARLSKSRRLENLIAQLPGEKKNGLFGNLIALSLGLTPNFKSNFDLAEDAKLQLSKDTYDDDLDNLLAQIGDQYADLFLAAKNLSDAILLSDILRVNTEITKAPLSASMIKRYDEHHQDLTLLKALVRQQLPEKYKEIFFDQSKNGYAGYIDGGASQEEFYKFIKPILEKMDGTEELLVKLNREDLLRKQRTFDNGSIPHQIHLGELHAILRRQEDFYPFLKDNREKIEKILTFRIPYYVGPLARGNSRFAWMTRKSEETITPWNFEEVVDKGASAQSFIERMTNFDKNLPNEKVLPKHSLLYEYFTVYNELTKVKYVTEGMRKPAFLSGEQKKAIVDLLFKTNRKVTVKQLKEDYFKKIECFDSVEISGVEDRFNASLGTYHDLLKIIKDKDFLDNEENEDILEDIVLTLTLFEDREMIEERLKTYAHLFDDKVMKQLKRRRYTGWGRLSRKLINGIRDKQSGKTILDFLKSDGFANRNFMQLIHDDSLTFKEDIQKAQVSGQGDSLHEHIANLAGSPAIKKGILQTVKVVDELVKVMGRHKPENIVIEMARENQTTQKGQKNSRERMKRIEEGIKELGSQILKEHPVENTQLQNEKLYLYYLQNGRDMYVDQELDINRLSDYDVDHIVPQSFLKDDSIDNKVLTRSDKNRGKSDNVPSEEVVKKMKNYWRQLLNAKLITQRKFDNLTKAERGGLSELDKAGFIKRQLVETRQITKHVAQILDSRMNTKYDENDKLIREVKVITLKSKLVSDFRKDFQFYKVREINNYHHAHDAYLNAVVGTALSHEYWMRHALTLAKRARDEREVPVGAVLVLNNRVIGEGWNRAIGLHDPTAHAEIMALRQGGLVMQNYRLIDATLYVTFEPCVMCAGAMIHSRIGRVVFGVRNAKTGAAGSLMDVLHYPGMNHRVEITEGILADECAALLCYFFRMPRQVFNAQKKAQSSTDGSSGSSGSETPGTSESATPESSGGSSIKKYPKLESEFVYGDYKVYDVRKMIAKSEQEIGKATAKYFFYSNIMNFFKTEITLANGEIRKRPLIETNGETGEIVWDKGRDFATVRKVLSMPQVNIVKKTEVQTGGFSKESILPKRNSDKLIARKKDWDPKKYGGFDSPTVAYSVLVVAKVEKGKSKKLKSVKELLGITIMERSSFEKNPIDFLEAKGYKEVKKDLIIKLPKYSLFELENGRKRMLASAGELQKGNELALPSKYVNFLYLASHYEKLKGSPEDNEQKQLFVEQHKHYLDEIIEQISEFSKRVILADANLDKVLSAYNKHRDKPIREQAENIIHLFTLTNLGAPAAFKYFDTTIDRKRYTSTKEVLDATLIHQSITGLYETRIDLSQLGGD

SEQ ID NO: 158 - protein, 1421 aa, Artificial Sequence
  Description of Artificial Sequence: Synthetic polypeptide
MDKKYSIGLAIGTNSVGWAVITDEYKVPSKKFKVLGNTDRHSIKKNLIGALLFDSGETAEATRLKRTARRRYTRRKNRICYLQEIFSNEMAKVDDSFFHRLEESFLVEEDKKHERHPIFGNIVDEVAYHEKYPTIYHLRKKLVDSTDKADLRLIYLALAHMIKFRGHFLIEGDLNPDNSDVDKLFIQLVQTYNQLFEENPINASGVDAKAILSARLSKSRRLENLIAQLPGEKKNGLFGNLIALSLGLTPNFKSNFDLAEDAKLQLSKDTYDDDLDNLLAQIGDQYADLFLAAKNLSDAILLSDILRVNTEITKAPLSASMIKRYDEHHQDLTLLKALVRQQLPEKYKEIFFDQSKNGYAGYIDGGASQEEFYKFIKPILEKMDGTEELLVKLNREDLLRKQRTFDNGSIPHQIHLGELHAILRRQEDFYPFLKDNREKIEKILTFRIPYYVGPLARGNSRFAWMTRKSEETITPWNFEEVVDKGASAQSFIERMTNFDKNLPNEKVLPKHSLLYEYFTVYNELTKVKYVTEGMRKPAFLSGEQKKAIVDLLFKTNRKVTVKQLKEDYFKKIECFDSVEISGVEDRFNASLGTYHDLLKIIKDKDFLDNEENEDILEDIVLTLTLFEDREMIEERLKTYAHLFDDKVMKQLKRRRYTGWGRLSRKLINGIRDKQSGKTILDFLKSDGFANRNFMQLIHDDSLTFKEDIQKAQVSGQGDSLHEHIANLAGSPAIKKGILQTVKVVDELVKVMGRHKPENIVIEMARENQTTQKGQKNSRERMKRIEEGIKELGSEVEFSHEYWMRHALTLAKRARDEREVPVGAVLVLNNRVIGEGWNRAIGLHDPTAHAEIMALRQGGLVMQNYRLIDATLYVTFEPCVMCAGAMIHSRIGRVVFGVRNAKTGAAGSLMDVLHYPGMNHRVEITEGILADECAALLCYFFRMPRQVFNAQKKAQSSTDGGLSELDKAGFIKRQLVETRQITKHVAQILDSRMNTKYDENDKLIREVKVITLKSKLVSDFRKDFQFYKVREINNYHHAHDAYLNAVVGTALIKKYPKLESEFVYGDYKVYDVRKMIAKSEQEIGKATAKYFFYSNIMNFFKTEITLANGEIRKRPLIETNGETGEIVWDKGRDFATVRKVLSMPQVNIVKKTEVQTGGFSKESILPKRNSDKLIARKKDWDPKKYGGFDSPTVAYSVLVVAKVEKGKSKKLKSVKELLGITIMERSSFEKNPIDFLEAKGYKEVKKDLIIKLPKYSLFELENGRKRMLASAGELQKGNELALPSKYVNFLYLASHYEKLKGSPEDNEQKQLFVEQHKHYLDEIIEQISEFSKRVILADANLDKVLSAYNKHRDKPIREQAENIIHLFTLTNLGAPAAFKYFDTTIDRKRYTSTKEVLDATLIHQSITGLYETRIDLSQLGGD

SEQ ID NO: 159 - protein, 1552 aa, Artificial Sequence
  Description of Artificial Sequence: Synthetic polypeptide
MSEVEFSHEYWMRHALTLAKRARDEREVPVGAVLVLNNRVIGEGWNRAIGLHDPTAHAEIMALRQGGLVMQNYRLIDATLYVTFEPCVMCAGAMIHSRIGRVVFGVRNAKTGAAGSLMDVLHYPGMNHRVEITEGILADECAALLCYFFRMPRSGGSSGGSSGSETPGTSESATPESSGGSSGGSDKKYSIGLAIGTNSVGWAVITDEYKVPSKKFKVLGNTDRHSIKKNLIGALLFDSGETAEATRLKRTARRRYTRRKNRICYLQEIFSNEMAKVDDSFFHRLEESFLVEEDKKHERHPIFGNIVDEVAYHEKYPTIYHLRKKLVDSTDKADLRLIYLALAHMIKFRGHFLIEGDLNPDNSDVDKLFIQLVQTYNQLFEENPINASGVDAKAILSARLSKSRRLENLIAQLPGEKKNGLFGNLIALSLGLTPNFKSNFDLAEDAKLQLSKDTYDDDLDNLLAQIGDQYADLFLAAKNLSDAILLSDILRVNTEITKAPLSASMIKRYDEHHQDLTLLKALVRQQLPEKYKEIFFDQSKNGYAGYIDGGASQEEFYKFIKPILEKMDGTEELLVKLNREDLLRKQRTFDNGSIPHQIHLGELHAILRRQEDFYPFLKDNREKIEKILTFRIPYYVGPLARGNSRFAWMTRKSEETITPWNFEEVVDKGASAQSFIERMTNFDKNLPNEKVLPKHSLLYEYFTVYNELTKVKYVTEGMRKPAFLSGEQKKAIVDLLFKTNRKVTVKQLKEDYFKKIECFDSVEISGVEDRFNASLGTYHDLLKIIKDKDFLDNEENEDILEDIVLTLTLFEDREMIEERLKTYAHLFDDKVMKQLKRRRYTGWGRLSRKLINGIRDKQSGKTILDFLKSDGFANRNFMQLIHDDSLTFKEDIQKAQVSGQGDSLHEHIANLAGSPAIKKGILQTVKVVDELVKVMGRHKPENIVIEMARENQTTQKGQKNSRERMKRIEEGIKELGSQILKEHPVENTQLQNEKLYLYYLQNGRDMYVDQELDINRLSDYDVDHIVPQSFLKDDSIDNKVLTRSDKNRGKSDNVPSEEVVKKMKNYWRQLLNAKLITQRKFDNLTKAERGGLSELDKAGFIKRQLVETRQITKHVAQILDSRMNTKYDENDKLIREVKVITLKSKLVSDFRKDFQFYKVREINNYHHAHDAYLNAVVGTALIKKYPKLESEFVYGDYKVYDVRKMIAKSEQEIGKATAKYFFYSNIMNFFKTEITLANGEIRKRPLIETNGETGEIVWDKGRDFATVRKVLSMPQVNIVKKTEVQTGGFSKESILPKRNSDKLIARKKDWDPKKYGGFDSPTVAYSVLVVAKVEKGKSKKLKSVKELLGITIMERSSFEKNPIDFLEAKGYKEVKKDLIIKLPKYSLFELENGRKRMLASAGELQKGNELALPSKYVNFLYLASHYEKLKGSPEDNEQKQLFVEQHKHYLDEIIEQISEFSKRVILADANLDKVLSAYNKHRDKPIREQAENIIHLFTLTNLGAPAAFKYFDTTIDRKRYTSTKEVLDATLIHQSITGLYETRIDLSQLGGD

SEQ ID NO: 160 - protein, 1545 aa, Artificial Sequence
  Description of Artificial Sequence: Synthetic polypeptide
MSEVEFSHEYWMRHALTLAKRARDEREVPVGAVLVLNNRVIGEGWNRTAHAEIMALRQGGLVMQNYRLIDATLYVTFEPCVMCAGAMIHSRIGRVVFGVRNAKTGAAGSLMDVLHYPGMNHRVEITEGILADECAALLCYFFRMPRSGGSSGGSSGSETPGTSESATPESSGGSSGGSDKKYSIGLAIGTNSVGWAVITDEYKVPSKKFKVLGNTDRHSIKKNLIGALLFDSGETAEATRLKRTARRRYTRRKNRICYLQEIFSNEMAKVDDSFFHRLEESFLVEEDKKHERHPIFGNIVDEVAYHEKYPTIYHLRKKLVDSTDKADLRLIYLALAHMIKFRGHFLIEGDLNPDNSDVDKLFIQLVQTYNQLFEENPINASGVDAKAILSARLSKSRRLENLIAQLPGEKKNGLFGNLIALSLGLTPNFKSNFDLAEDAKLQLSKDTYDDDLDNLLAQIGDQYADLFLAAKNLSDAILLSDILRVNTEITKAPLSASMIKRYDEHHQDLTLLKALVRQQLPEKYKEIFFDQSKNGYAGYIDGGASQEEFYKFIKPILEKMDGTEELLVKLNREDLLRKQRTFDNGSIPHQIHLGELHAILRRQEDFYPFLKDNREKIEKILTFRIPYYVGPLARGNSRFAWMTRKSEETITPWNFEEVVDKGASAQSFIERMTNFDKNLPNEKVLPKHSLLYEYFTVYNELTKVKYVTEGMRKPAFLSGEQKKAIVDLLFKTNRKVTVKQLKEDYFKKIECFDSVEISGVEDRFNASLGTYHDLLKIIKDKDFLDNEENEDILEDIVLTLTLFEDREMIEERLKTYAHLFDDKVMKQLKRRRYTGWGRLSRKLINGIRDKQSGKTILDFLKSDGFANRNFMQLIHDDSLTFKEDIQKAQVSGQGDSLHEHIANLAGSPAIKKGILQTVKVVDELVKVMGRHKPENIVIEMARENQTTQKGQKNSRERMKRIEEGIKELGSQILKEHPVENTQLQNEKLYLYYLQNGRDMYVDQELDINRLSDYDVDHIVPQSFLKDDSIDNKVLTRSDKNRGKSDNVPSEEVVKKMKNYWRQLLNAKLITQRKFDNLTKAERGGLSELDKAGFIKRQLVETRQITKHVAQILDSRMNTKYDENDKLIREVKVITLKSKLVSDFRKDFQFYKVREINNYHHAHDAYLNAVVGTALIKKYPKLESEFVYGDYKVYDVRKMIAKSEQEIGKATAKYFFYSNIMNFFKTEITLANGEIRKRPLIETNGETGEIVWDKGRDFATVRKVLSMPQVNIVKKTEVQTGGFSKESILPKRNSDKLIARKKDWDPKKYGGFDSPTVAYSVLVVAKVEKGKSKKLKSVKELLGITIMERSSFEKNPIDFLEAKGYKEVKKDLIIKLPKYSLFELENGRKRMLASAGELQKGNELALPSKYVNFLYLASHYEKLKGSPEDNEQKQLFVEQHKHYLDEIIEQISEFSKRVILADANLDKVLSAYNKHRDKPIREQAENIIHLFTLTNLGAPAAFKYFDTTIDRKRYTSTKEVLDATLIHQSITGLYETRIDLSQLGGD

SEQ ID NO: 161 - protein, 1541 aa, Artificial Sequence
  Description of Artificial Sequence: Synthetic polypeptide
MDKKYSIGLAIGTNSVGWAVITDEYKVPSKKFKVLGNTDRHSIKKNLIGALLFDSGETAEATRLKRTARRRYTRRKNRICYLQEIFSNEMAKVDDSFFHRLEESFLVEEDKKHERHPIFGNIVDEVAYHEKYPTIYHLRKKLVDSTDKADLRLIYLALAHMIKFRGHFLIEGDLNPDNSDVDKLFIQLVQTYNQLFEENPINASGVDAKAILSARLSKSRRLENLIAQLPGEKKNGLFGNLIALSLGLTPNFKSNFDLAEDAKLQLSKDTYDDDLDNLLAQIGDQYADLFLAAKNLSDAILLSDILRVNTEITKAPLSASMIKRYDEHHQDLTLLKALVRQQLPEKYKEIFFDQSKNGYAGYIDGGASQEEFYKFIKPILEKMDGTEELLVKLNREDLLRKQRTFDNGSIPHQIHLGELHAILRRQEDFYPFLKDNREKIEKILTFRIPYYVGPLARGNSRFAWMTRKSEETITPWNFEEVVDKGASAQSFIERMTNFDKNLPNEKVLPKHSLLYEYFTVYNELTKVKYVTEGMRKPAFLSGEQKKAIVDLLFKTNRKVTVKQLKEDYFKKIECFDSVEISGVEDRFNASLGTYHDLLKIIKDKDFLDNEENEDILEDIVLTLTLFEDREMIEERLKTYAHLFDDKVMKQLKRRRYTGWGRLSRKLINGIRDKQSGKTILDFLKSDGFANRNFMQLIHDDSLTFKEDIQKAQVSGQGDSLHEHIANLAGSPAIKKGILQTVKVVDELVKVMGRHKPENIVIEMARENQTTQKGQKNSRERMKRIEEGIKELGSQILKEHPVENTQLQNEKLYLYYLQNGRDMYVDQELDINRLSDYDVDHIVPQSFLKDDSIDNKVLTRSDKNRGKSDNVPSEEVVKKMKNYWRQLLNAKLITQRKFDNLTKAERGGLSELDKAGFIKRQLVETRQITKHVAQILDSRMNTKYDENDKLIREVKVITLKSKLVSDFRKDFQFYKVREINNYHHAHDAYLNAVVGTALIKKYPKGSSGSETPGTSESATPESSGSEVEFSHEYWMRHALTLAKRARDEREVPVGAVLVLNNRVIGEGWNRAIGLHDPTAHAEIMALRQGGLVMQNYRLIDATLYVTFEPCVMCAGAMIHSRIGRVVFGVRNAKTGAAGSLMDVLHYPGMNHRVEITEGILADECAALLCYFFRMPRQLESEFVYGDYKVYDVRKMIAKSEQEIGKATAKYFFYSNIMNFFKTEITLANGEIRKRPLIETNGETGEIVWDKGRDFATVRKVLSMPQVNIVKKTEVQTGGFSKESILPKRNSDKLIARKKDWDPKKYGGFDSPTVAYSVLVVAKVEKGKSKKLKSVKELLGITIMERSSFEKNPIDFLEAKGYKEVKKDLIIKLPKYSLFELENGRKRMLASAGELQKGNELALPSKYVNFLYLASHYEKLKGSPEDNEQKQLFVEQHKHYLDEIIEQISEFSKRVILADANLDKVLSAYNKHRDKPIREQAENIIHLFTLTNLGAPAAFKYFDTTIDRKRYTSTKEVLDATLIHQSITGLYETRIDLSQLGGD

SEQ ID NO: 162 - protein, 1541 aa, Artificial Sequence
  Description of Artificial Sequence: Synthetic polypeptide
MDKKYSIGLAIGTNSVGWAVITDEYKVPSKKFKVLGNTDRHSIKKNLIGALLFDSGETAEATRLKRTARRRYTRRKNRICYLQEIFSNEMAKVDDSFFHRLEESFLVEEDKKHERHPIFGNIVDEVAYHEKYPTIYHLRKKLVDSTDKADLRLIYLALAHMIKFRGHFLIEGDLNPDNSDVDKLFIQLVQTYNQLFEENPINASGVDAKAILSARLSKSRRLENLIAQLPGEKKNGLFGNLIALSLGLTPNFKSNFDLAEDAKLQLSKDTYDDDLDNLLAQIGDQYADLFLAAKNLSDAILLSDILRVNTEITKAPLSASMIKRYDEHHQDLTLLKALVRQQLPEKYKEIFFDQSKNGYAGYIDGGASQEEFYKFIKPILEKMDGTEELLVKLNREDLLRKQRTFDNGSIPHQIHLGELHAILRRQEDFYPFLKDNREKIEKILTFRIPYYVGPLARGNSRFAWMTRKSEETITPWNFEEVVDKGASAQSFIERMTNFDKNLPNEKVLPKHSLLYEYFTVYNELTKVKYVTEGMRKPAFLSGEQKKAIVDLLFKTNRKVTVKQLKEDYFKKIECFDSVEISGVEDRFNASLGTYHDLLKIIKDKDFLDNEENEDILEDIVLTLTLFEDREMIEERLKTYAHLFDDKVMKQLKRRRYTGWGRLSRKLINGIRDKQSGKTILDFLKSDGFANRNFMQLIHDDSLTFKEDIQKAQVSGQGDSLHEHIANLAGSPAIKKGILQTVKVVDELVKVMGRHKPENIVIEMARENQTTQKGQKNSRERMKRIEEGIKELGSQILKEHPVENTQLQNEKLYLYYLQNGRDMYVDQELDINRLSDYDVDHIVPQSFLKDDSIDNKVLTRSDKNRGKSDNVPSEEVVKKMKNYWRQLLNAKLITQRKFDNLTKAERGGLSELDKAGFIKRQLVETRQITKHVAQILDSRMNTKYDENDKLIREVKVITLKSKLVSDFRKDFQFYKVREINNYHHAHDAYLNAVVGTALIKKYPKLGSSGSETPGTSESATPESSGSEVEFSHEYWMRHALTLAKRARDEREVPVGAVLVLNNRVIGEGWNRAIGLHDPTAHAEIMALRQGGLVMQNYRLIDATLYVTFEPCVMCAGAMIHSRIGRVVFGVRNAKTGAAGSLMDVLHYPGMNHRVEITEGILADECAALLCYFFRMPRQESEFVYGDYKVYDVRKMIAKSEQEIGKATAKYFFYSNIMNFFKTEITLANGEIRKRPLIETNGETGEIVWDKGRDFATVRKVLSMPQVNIVKKTEVQTGGFSKESILPKRNSDKLIARKKDWDPKKYGGFDSPTVAYSVLVVAKVEKGKSKKLKSVKELLGITIMERSSFEKNPIDFLEAKGYKEVKKDLIIKLPKYSLFELENGRKRMLASAGELQKGNELALPSKYVNFLYLASHYEKLKGSPEDNEQKQLFVEQHKHYLDEIIEQISEFSKRVILADANLDKVLSAYNKHRDKPIREQAENIIHLFTLTNLGAPAAFKYFDTTIDRKRYTSTKEVLDATLIHQSITGLYETRIDLSQLGGD

SEQ ID NO: 163 - protein, 1541 aa, Artificial Sequence
  Description of Artificial Sequence: Synthetic polypeptide
MDKKYSIGLAIGTNSVGWAVITDEYKVPSKKFKVLGNTDRHSIKKNLIGALLFDSGETAEATRLKRTARRRYTRRKNRICYLQEIFSNEMAKVDDSFFHRLEESFLVEEDKKHERHPIFGNIVDEVAYHEKYPTIYHLRKKLVDSTDKADLRLIYLALAHMIKFRGHFLIEGDLNPDNSDVDKLFIQLVQTYNQLFEENPINASGVDAKAILSARLSKSRRLENLIAQLPGEKKNGLFGNLIALSLGLTPNFKSNFDLAEDAKLQLSKDTYDDDLDNLLAQIGDQYADLFLAAKNLSDAILLSDILRVNTEITKAPLSASMIKRYDEHHQDLTLLKALVRQQLPEKYKEIFFDQSKNGYAGYIDGGASQEEFYKFIKPILEKMDGTEELLVKLNREDLLRKQRTFDNGSIPHQIHLGELHAILRRQEDFYPFLKDNREKIEKILTFRIPYYVGPLARGNSRFAWMTRKSEETITPWNFEEVVDKGASAQSFIERMTNFDKNLPNEKVLPKHSLLYEYFTVYNELTKVKYVTEGMRKPAFLSGEQKKAIVDLLFKTNRKVTVKQLKEDYFKKIECFDSVEISGVEDRFNASLGTYHDLLKIIKDKDFLDNEENEDILEDIVLTLTLFEDREMIEERLKTYAHLFDDKVMKQLKRRRYTGWGRLSRKLINGIRDKQSGKTILDFLKSDGFANRNFMQLIHDDSLTFKEDIQKAQVSGQGDSLHEHIANLAGSPAIKKGILQTVKVVDELVKVMGRHKPENIVIEMARENQTTQKGQKNSRERMKRIEEGIKELGSQILKEHPVENTQLQNEKLYLYYLQNGRDMYVDQELDINRLSDYDVDHIVPQSFLKDDSIDNKVLTRSDKNRGKSDNVPSEEVVKKMKNYWRQLLNAKLITQRKFDNLTKAERGGLSELDKAGFIKRQLVETRQITKHVAQILDSRMNTKYDENDKLIREVKVITLKSKLVSDFRKDFQFYKVREINNYHHAHDAYLNAVVGTALIKKYPKLEGSSGSETPGTSESATPESSGSEVEFSHEYWMRHALTLAKRARDEREVPVGAVLVLNNRVIGEGWNRAIGLHDPTAHAEIMALRQGGLVMQNYRLIDATLYVTFEPCVMCAGAMIHSRIGRVVFGVRNAKTGAAGSLMDVLHYPGMNHRVEITEGILADECAALLCYFFRMPRQSEFVYGDYKVYDVRKMIAKSEQEIGKATAKYFFYSNIMNFFKTEITLANGEIRKRPLIETNGETGEIVWDKGRDFATVRKVLSMPQVNIVKKTEVQTGGFSKESILPKRNSDKLIARKKDWDPKKYGGFDSPTVAYSVLVVAKVEKGKSKKLKSVKELLGITIMERSSFEKNPIDFLEAKGYKEVKKDLIIKLPKYSLFELENGRKRMLASAGELQKGNELALPSKYVNFLYLASHYEKLKGSPEDNEQKQLFVEQHKHYLDEIIEQISEFSKRVILADANLDKVLSAYNKHRDKPIREQAENIIHLFTLTNLGAPAAFKYFDTTIDRKRYTSTKEVLDATLIHQSITGLYETRIDLSQLGGD

SEQ ID NO: 164 - protein, 1541 aa, Artificial Sequence
  Description of Artificial Sequence: Synthetic polypeptide
MDKKYSIGLAIGTNSVGWAVITDEYKVPSKKFKVLGNTDRHSIKKNLIGALLFDSGETAEATRLKRTARRRYTRRKNRICYLQEIFSNEMAKVDDSFFHRLEESFLVEEDKKHERHPIFGNIVDEVAYHEKYPTIYHLRKKLVDSTDKADLRLIYLALAHMIKFRGHFLIEGDLNPDNSDVDKLFIQLVQTYNQLFEENPINASGVDAKAILSARLSKSRRLENLIAQLPGEKKNGLFGNLIALSLGLTPNFKSNFDLAEDAKLQLSKDTYDDDLDNLLAQIGDQYADLFLAAKNLSDAILLSDILRVNTEITKAPLSASMIKRYDEHHQDLTLLKALVRQQLPEKYKEIFFDQSKNGYAGYIDGGASQEEFYKFIKPILEKMDGTEELLVKLNREDLLRKQRTFDNGSIPHQIHLGELHAILRRQEDFYPFLKDNREKIEKILTFRIPYYVGPLARGNSRFAWMTRKSEETITPWNFEEVVDKGASAQSFIERMTNFDKNLPNEKVLPKHSLLYEYFTVYNELTKVKYVTEGMRKPAFLSGEQKKAIVDLLFKTNRKVTVKQLKEDYFKKIECFDSVEISGVEDRFNASLGTYHDLLKIIKDKDFLDNEENEDILEDIVLTLTLFEDREMIEERLKTYAHLFDDKVMKQLKRRRYTGWGRLSRKLINGIRDKQSGKTILDFLKSDGFANRNFMQLIHDDSLTFKEDIQKAQVSGQGDSLHEHIANLAGSPAIKKGILQTVKVVDELVKVMGRHKPENIVIEMARENQTTQKGQKNSRERMKRIEEGIKELGSQILKEHPVENTQLQNEKLYLYYLQNGRDMYVDQELDINRLSDYDVDHIVPQSFLKDDSIDNKVLTRSDKNRGKSDNVPSEEVVKKMKNYWRQLLNAKLITQRKFDNLTKAERGGLSELDKAGFIKRQLVETRQITKHVAQILDSRMNTKYDENDKLIREVKVITLKSKLVSDFRKDFQFYKVREINNYHHAHDAYLNAVVGTALIKKYPKLESGSSGSETPGTSESATPESSGSEVEFSHEYWMRHALTLAKRARDEREVPVGAVLVLNNRVIGEGWNRAIGLHDPTAHAEIMALRQGGLVMQNYRLIDATLYVTFEPCVMCAGAMIHSRIGRVVFGVRNAKTGAAGSLMDVLHYPGMNHRVEITEGILADECAALLCYFFRMPRQEFVYGDYKVYDVRKMIAKSEQEIGKATAKYFFYSNIMNFFKTEITLANGEIRKRPLIETNGETGEIVWDKGRDFATVRKVLSMPQVNIVKKTEVQTGGFSKESILPKRNSDKLIARKKDWDPKKYGGFDSPTVAYSVLVVAKVEKGKSKKLKSVKELLGITIMERSSFEKNPIDFLEAKGYKEVKKDLIIKLPKYSLFELENGRKRMLASAGELQKGNELALPSKYVNFLYLASHYEKLKGSPEDNEQKQLFVEQHKHYLDEIIEQISEFSKRVILADANLDKVLSAYNKHRDKPIREQAENIIHLFTLTNLGAPAAFKYFDTTIDRKRYTSTKEVLDATLIHQSITGLYETRIDLSQLGGD

SEQ ID NO: 165 - protein, 1541 aa, Artificial Sequence
  Description of Artificial Sequence: Synthetic polypeptide
MDKKYSIGLAIGTNSVGWAVITDEYKVPSKKFKVLGNTDRHSIKKNLIGALLFDSGETAEATRLKRTARRRYTRRKNRICYLQEIFSNEMAKVDDSFFHRLEESFLVEEDKKHERHPIFGNIVDEVAYHEKYPTIYHLRKKLVDSTDKADLRLIYLALAHMIKFRGHFLIEGDLNPDNSDVDKLFIQLVQTYNQLFEENPINASGVDAKAILSARLSKSRRLENLIAQLPGEKKNGLFGNLIALSLGLTPNFKSNFDLAEDAKLQLSKDTYDDDLDNLLAQIGDQYADLFLAAKNLSDAILLSDILRVNTEITKAPLSASMIKRYDEHHQDLTLLKALVRQQLPEKYKEIFFDQSKNGYAGYIDGGASQEEFYKFIKPILEKMDGTEELLVKLNREDLLRKQRTFDNGSIPHQIHLGELHAILRRQEDFYPFLKDNREKIEKILTFRIPYYVGPLARGNSRFAWMTRKSEETITPWNFEEVVDKGASAQSFIERMTNFDKNLPNEKVLPKHSLLYEYFTVYNELTKVKYVTEGMRKPAFLSGEQKKAIVDLLFKTNRKVTVKQLKEDYFKKIECFDSVEISGVEDRFNASLGTYHDLLKIIKDKDFLDNEENEDILEDIVLTLTLFEDREMIEERLKTYAHLFDDKVMKQLKRRRYTGWGRLSRKLINGIRDKQSGKTILDFLKSDGFANRNFMQLIHDDSLTFKEDIQKAQVSGQGDSLHEHIANLAGSPAIKKGILQTVKVVDELVKVMGRHKPENIVIEMARENQTTQKGQKNSRERMKRIEEGIKELGGSSGSETPGTSESATPESSGSEVEFSHEYWMRHALTLAKRARDEREVPVGAVLVLNNRVIGEGWNRAIGLHDPTAHAEIMALRQGGLVMQNYRLIDATLYVTFEPCVMCAGAMIHSRIGRVVFGVRNAKTGAAGSLMDVLHYPGMNHRVEITEGILADECAALLCYFFRMPRQSQILKEHPVENTQLQNEKLYLYYLQNGRDMYVDQELDINRLSDYDVDHIVPQSFLKDDSIDNKVLTRSDKNRGKSDNVPSEEVVKKMKNYWRQLLNAKLITQRKFDNLTKAERGGLSELDKAGFIKRQLVETRQITKHVAQILDSRMNTKYDENDKLIREVKVITLKSKLVSDFRKDFQFYKVREINNYHHAHDAYLNAVVGTALIKKYPKLESEFVYGDYKVYDVRKMIAKSEQEIGKATAKYFFYSNIMNFFKTEITLANGEIRKRPLIETNGETGEIVWDKGRDFATVRKVLSMPQVNIVKKTEVQTGGFSKESILPKRNSDKLIARKKDWDPKKYGGFDSPTVAYSVLVVAKVEKGKSKKLKSVKELLGITIMERSSFEKNPIDFLEAKGYKEVKKDLIIKLPKYSLFELENGRKRMLASAGELQKGNELALPSKYVNFLYLASHYEKLKGSPEDNEQKQLFVEQHKHYLDEIIEQISEFSKRVILADANLDKVLSAYNKHRDKPIREQAENIIHLFTLTNLGAPAAFKYFDTTIDRKRYTSTKEVLDATLIHQSITGLYETRIDLSQLGGD

SEQ ID NO: 166 - protein, 1541 aa, Artificial Sequence
  Description of Artificial Sequence: Synthetic polypeptide
MDKKYSIGLAIGTNSVGWAVITDEYKVPSKKFKVLGNTDRHSIKKNLIGALLFDSGETAEATRLKRTARRRYTRRKNRICYLQEIFSNEMAKVDDSFFHRLEESFLVEEDKKHERHPIFGNIVDEVAYHEKYPTIYHLRKKLVDSTDKADLRLIYLALAHMIKFRGHFLIEGDLNPDNSDVDKLFIQLVQTYNQLFEENPINASGVDAKAILSARLSKSRRLENLIAQLPGEKKNGLFGNLIALSLGLTPNFKSNFDLAEDAKLQLSKDTYDDDLDNLLAQIGDQYADLFLAAKNLSDAILLSDILRVNTEITKAPLSASMIKRYDEHHQDLTLLKALVRQQLPEKYKEIFFDQSKNGYAGYIDGGASQEEFYKFIKPILEKMDGTEELLVKLNREDLLRKQRTFDNGSIPHQIHLGELHAILRRQEDFYPFLKDNREKIEKILTFRIPYYVGPLARGNSRFAWMTRKSEETITPWNFEEVVDKGASAQSFIERMTNFDKNLPNEKVLPKHSLLYEYFTVYNELTKVKYVTEGMRKPAFLSGEQKKAIVDLLFKTNRKVTVKQLKEDYFKKIECFDSVEISGVEDRFNASLGTYHDLLKIIKDKDFLDNEENEDILEDIVLTLTLFEDREMIEERLKTYAHLFDDKVMKQLKRRRYTGWGRLSRKLINGIRDKQSGKTILDFLKSDGFANRNFMQLIHDDSLTFKEDIQKAQVSGQGDSLHEHIANLAGSPAIKKGILQTVKVVDELVKVMGRHKPENIVIEMARENQTTQKGQKNSRERMKRIEEGIKELGSSGSETPGTSESATPESSGSEVEFSHEYWMRHALTLAKRARDEREVPVGAVLVLNNRVIGEGWNRAIGLHDPTAHAEIMALRQGGLVMQNYRLIDATLYVTFEPCVMCAGAMIHSRIGRVVFGVRNAKTGAAGSLMDVLHYPGMNHRVEITEGILADECAALLCYFFRMPRQGSQILKEHPVENTQLQNEKLYLYYLQNGRDMYVDQELDINRLSDYDVDHIVPQSFLKDDSIDNKVLTRSDKNRGKSDNVPSEEVVKKMKNYWRQLLNAKLITQRKFDNLTKAERGGLSELDKAGFIKRQLVETRQITKHVAQILDSRMNTKYDENDKLIREVKVITLKSKLVSDFRKDFQFYKVREINNYHHAHDAYLNAVVGTALIKKYPKLESEFVYGDYKVYDVRKMIAKSEQEIGKATAKYFFYSNIMNFFKTEITLANGEIRKRPLIETNGETGEIVWDKGRDFATVRKVLSMPQVNIVKKTEVQTGGFSKESILPKRNSDKLIARKKDWDPKKYGGFDSPTVAYSVLVVAKVEKGKSKKLKSVKELLGITIMERSSFEKNPIDFLEAKGYKEVKKDLIIKLPKYSLFELENGRKRMLASAGELQKGNELALPSKYVNFLYLASHYEKLKGSPEDNEQKQLFVEQHKHYLDEIIEQISEFSKRVILADANLDKVLSAYNKHRDKPIREQAENIIHLFTLTNLGAPAAFKYFDTTIDRKRYTSTKEVLDATLIHQSITGLYETRIDLSQLGGD

SEQ ID NO: 167 - protein, 1541 aa, Artificial Sequence
  Description of Artificial Sequence: Synthetic polypeptide
MDKKYSIGLAIGTNSVGWAVITDEYKVPSKKFKVLGNTDRHSIKKNLIGALLFDSGETAEATRLKRTARRRYTRRKNRICYLQEIFSNEMAKVDDSFFHRLEESFLVEEDKKHERHPIFGNIVDEVAYHEKYPTIYHLRKKLVDSTDKADLRLIYLALAHMIKFRGHFLIEGDLNPDNSDVDKLFIQLVQTYNQLFEENPINASGVDAKAILSARLSKSRRLENLIAQLPGEKKNGLFGNLIALSLGLTPNFKSNFDLAEDAKLQLSKDTYDDDLDNLLAQIGDQYADLFLAAKNLSDAILLSDILRVNTEITKAPLSASMIKRYDEHHQDLTLLKALVRQQLPEKYKEIFFDQSKNGYAGYIDGGASQEEFYKFIKPILEKMDGTEELLVKLNREDLLRKQRTFDNGSIPHQIHLGELHAILRRQEDFYPFLKDNREKIEKILTFRIPYYVGPLARGNSRFAWMTRKSEETITPWNFEEVVDKGASAQSFIERMTNFDKNLPNEKVLPKHSLLYEYFTVYNELTKVKYVTEGMRKPAFLSGEQKKAIVDLLFKTNRKVTVKQLKEDYFKKIECFDSVEISGVEDRFNASLGTYHDLLKIIKDKDFLDNEENEDILEDIVLTLTLFEDREMIEERLKTYAHLFDDKVMKQLKRRRYTGWGRLSRKLINGIRDKQSGKTILDFLKSDGFANRNFMQLIHDDSLTFKEDIQKAQVSGQGDSLHEHIANLAGSPAIKKGILQTVKVVDELVKVMGRHKPENIVIEMARENQTTQKGQKNSRERMKRIEEGIKEGSSGSETPGTSESATPESSGSEVEFSHEYWMRHALTLAKRARDEREVPVGAVLVLNNRVIGEGWNRAIGLHDPTAHAEIMALRQGGLVMQNYRLIDATLYVTFEPCVMCAGAMIHSRIGRVVFGVRNAKTGAAGSLMDVLHYPGMNHRVEITEGILADECAALLCYFFRMPRQLGSQILKEHPVENTQLQNEKLYLYYLQNGRDMYVDQELDINRLSDYDVDHIVPQSFLKDDSIDNKVLTRSDKNRGKSDNVPSEEVVKKMKNYWRQLLNAKLITQRKFDNLTKAERGGLSELDKAGFIKRQLVETRQITKHVAQILDSRMNTKYDENDKLIREVKVITLKSKLVSDFRKDFQFYKVREINNYHHAHDAYLNAVVGTALIKKYPKLESEFVYGDYKVYDVRKMIAKSEQEIGKATAKYFFYSNIMNFFKTEITLANGEIRKRPLIETNGETGEIVWDKGRDFATVRKVLSMPQVNIVKKTEVQTGGFSKESILPKRNSDKLIARKKDWDPKKYGGFDSPTVAYSVLVVAKVEKGKSKKLKSVKELLGITIMERSSFEKNPIDFLEAKGYKEVKKDLIIKLPKYSLFELENGRKRMLASAGELQKGNELALPSKYVNFLYLASHYEKLKGSPEDNEQKQLFVEQHKHYLDEIIEQISEFSKRVILADANLDKVLSAYNKHRDKPIREQAENIIHLFTLTNLGAPAAFKYFDTTIDRKRYTSTKEVLDATLIHQSITGLYETRIDLSQLGGD

SEQ ID NO: 168 - protein, 1484 aa, Artificial Sequence
  Description of Artificial Sequence: Synthetic polypeptide
MDKKYSIGLAIGTNSVGWAVITDEYKVPSKKFKVLGNTDRHSIKKNLIGALLFDSGETAEATRLKRTARRRYTRRKNRICYLQEIFSNEMAKVDDSFFHRLEESFLVEEDKKHERHPIFGNIVDEVAYHEKYPTIYHLRKKLVDSTDKADLRLIYLALAHMIKFRGHFLIEGDLNPDNSDVDKLFIQLVQTYNQLFEENPINASGVDAKAILSARLSKSRRLENLIAQLPGEKKNGLFGNLIALSLGLTPNFKSNFDLAEDAKLQLSKDTYDDDLDNLLAQIGDQYADLFLAAKNLSDAILLSDILRVNTEITKAPLSASMIKRYDEHHQDLTLLKALVRQQLPEKYKEIFFDQSKNGYAGYIDGGASQEEFYKFIKPILEKMDGTEELLVKLNREDLLRKQRTFDNGSIPHQIHLGELHAILRRQEDFYPFLKDNREKIEKILTFRIPYYVGPLARGNSRFAWMTRKSEETITPWNFEEVVDKGASAQSFIERMTNFDKNLPNEKVLPKHSLLYEYFTVYNELTKVKYVTEGMRKPAFLSGEQKKAIVDLLFKTNRKVTVKQLKEDYFKKIECFDSVEISGVEDRFNASLGTYHDLLKIIKDKDFLDNEENEDILEDIVLTLTLFEDREMIEERLKTYAHLFDDKVMKQLKRRRYTGWGRLSRKLINGIRDKQSGKTILDFLKSDGFANRNFMQLIHDDSLTFKEDIQKAQVSGQGDSLHEHIANLAGSPAIKKGILQTVKVVDELVKVMGRHKPENIVIEMARENQTTQKGQKNSRERMKRIEEGIKELGSQILKEHPVENTQLQNEKLYLYYLQNGRDMYVDQELDINRLSDYDVDHIVPQSFLKDDSIDNKVLTRSDKNRGKSDNVPSEEVVKKMKNYWRQLLNAKLITQRKFDNLTKAERGGLSELDKAGFIKRQLVETRQITKHVAQILDSRMNTKYDENDKLIREVKVITLKSKLVSDFRKDFQFYKVREINNYHHAHDAYLNAVVGTALIKKYPKLESEFVYGDYKVYSSGSEVEFSHEYWMRHALTLAKRARDEREVPVGAVLVLNNRVIGEGWNRAIGLHDPTAHAEIMALRQGGLVMQNYRLIDATLYVTFEPCVMCAGAMIHSRIGRVVFGVRNAKTGAAGSLMDVLHYPGMNHRVEITEGILADECAALLCYFFRMPRQVFNAQKKAQSSTDGEIVWDKGRDFATVRKVLSMPQVNIVKKTEVQTGGFSKESILPKRNSDKLIARKKDWDPKKYGGFDSPTVAYSVLVVAKVEKGKSKKLKSVKELLGITIMERSSFEKNPIDFLEAKGYKEVKKDLIIKLPKYSLFELENGRKRMLASAGELQKGNELALPSKYVNFLYLASHYEKLKGSPEDNEQKQLFVEQHKHYLDEIIEQISEFSKRVILADANLDKVLSAYNKHRDKPIREQAENIIHLFTLTNLGAPAAFKYFDTTIDRKRYTSTKEVLDATLIHQSITGLYETRIDLSQLGGD

SEQ ID NO: 169 - protein, 1554 aa, Artificial Sequence
  Description of Artificial Sequence: Synthetic polypeptide
MDKKYSIGLAIGTNSVGWAVITDEYKVPSKKFKVLGNTDRHSIKKNLIGALLFDSGETAEATRLKRTARRRYTRRKNRICYLQEIFSNEMAKVDDSFFHRLEESFLVEEDKKHERHPIFGNIVDEVAYHEKYPTIYHLRKKLVDSTDKADLRLIYLALAHMIKFRGHFLIEGDLNPDNSDVDKLFIQLVQTYNQLFEENPINASGVDAKAILSARLSKSRRLENLIAQLPGEKKNGLFGNLIALSLGLTPNFKSNFDLAEDAKLQLSKDTYDDDLDNLLAQIGDQYADLFLAAKNLSDAILLSDILRVNTEITKAPLSASMIKRYDEHHQDLTLLKALVRQQLPEKYKEIFFDQSKNGYAGYIDGGASQEEFYKFIKPILEKMDGTEELLVKLNREDLLRKQRTFDNGSIPHQIHLGELHAILRRQEDFYPFLKDNREKIEKILTFRIPYYVGPLARGNSRFAWMTRKSEETITPWNFEEVVDKGASAQSFIERMTNFDKNLPNEKVLPKHSLLYEYFTVYNELTKVKYVTEGMRKPAFLSGEQKKAIVDLLFKTNRKVTVKQLKEDYFKKIECFDSVEISGVEDRFNASLGTYHDLLKIIKDKDFLDNEENEDILEDIVLTLTLFEDREMIEERLKTYAHLFDDKVMKQLKRRRYTGWGRLSRKLINGIRDKQSGKTILDFLKSDGFANRNFMQLIHDDSLTFKEDIQKAQVSGQGDSLHEHIANLAGSPAIKKGILQTVKVVDELVKVMGRHKPENIVIEMARENQTTQKGQKNSRERMKRIEEGIKELGSQILKEHPVENTQLQNEKLYLYYLQNGRDMYVDQELDINRLSDYDVDHIVPQSFLKDDSIDNKVLTRSDKNRGKSDNVPSEEVVKKMKNYWRQLLNAKLITQRKFDNLTKAERGGLSELDKAGFIKRQLVETRQITKHVAQILDSRMNTKYDENDKLIREVKVITLKSKLVSDFRKDFQFYKVREINNYHHAHDAYLNAVVGTALIKKYPKLESEFVYGDYKVYDVRKMIAKSEQEIGKATAKYFFYSNIMNFFKTEITLANGEIRKRPLIETNMNHRVEITEGILADECAALLCYFFRMPRQVFNAQKKAQSSTDGSSGSETPGTSESATPESSGSEVEFSHEYWMRHALTLAKRARDEREVPVGAVLVLNNRVIGEGWNRAIGLHDPTAHAEIMALRQGGLVMQNYRLIDATLYVTFEPCVMCAGAMIHSRIGRVVFGVRNAKTGAAGSLMDVLHYPGGETGEIVWDKGRDFATVRKVLSMPQVNIVKKTEVQTGGFSKESILPKRNSDKLIARKKDWDPKKYGGFDSPTVAYSVLVVAKVEKGKSKKLKSVKELLGITIMERSSFEKNPIDFLEAKGYKEVKKDLIIKLPKYSLFELENGRKRMLASAGELQKGNELALPSKYVNFLYLASHYEKLKGSPEDNEQKQLFVEQHKHYLDEIIEQISEFSKRVILADANLDKVLSAYNKHRDKPIREQAENIIHLFTLTNLGAPAAFKYFDTTIDRKRYTSTKEVLDATLIHQSITGLYETRIDLSQLGGD

SEQ ID NO: 170 - protein, 1554 aa, Artificial Sequence
  Description of Artificial Sequence: Synthetic polypeptide
MDKKYSIGLAIGTNSVGWAVITDEYKVPSKKFKVLGNTDRHSIKKNLIGALLFDSGETAEATRLKRTARRRYTRRKNRICYLQEIFSNEMAKVDDSFFHRLEESFLVEEDKKHERHPIFGNIVDEVAYHEKYPTIYHLRKKLVDSTDKADLRLIYLALAHMIKFRGHFLIEGDLNPDNSDVDKLFIQLVQTYNQLFEENPINASGVDAKAILSARLSKSRRLENLIAQLPGEKKNGLFGNLIALSLGLTPNFKSNFDLAEDAKLQLSKDTYDDDLDNLLAQIGDQYADLFLAAKNLSDAILLSDILRVNTEITKAPLSASMIKRYDEHHQDLTLLKALVRQQLPEKYKEIFFDQSKNGYAGYIDGGASQEEFYKFIKPILEKMDGTEELLVKLNREDLLRKQRTFDNGSIPHQIHLGELHAILRRQEDFYPFLKDNREKIEKILTFRIPYYVGPLARGNSRFAWMTRKSEETITPWNFEEVVDKGASAQSFIERMTNFDKNLPNEKVLPKHSLLYEYFTVYNELTKVKYVTEGMRKPAFLSGEQKKAIVDLLFKTNRKVTVKQLKEDYFKKIECFDSVEISGVEDRFNASLGTYHDLLKIIKDKDFLDNEENEDILEDIVLTLTLFEDREMIEERLKTYAHLFDDKVMKQLKRRRYTGWGRLSRKLINGIRDKQSGKTILDFLKSDGFANRNFMQLIHDDSGSSGSETPGTSESATPESSGSEVEFSHEYWMRHALTLAKRARDEREVPVGAVLVLNNRVIGEGWNRAIGLHDPTAHAEIMALRQGGLVMQNYRLIDATLYVTFEPCVMCAGAMIHSRIGRVVFGVRNAKTGAAGSLMDVLHYPGMNHRVEITEGILADECAALLCYFFRMPRQVFNAQKKAQSSTDLTFKEDIQKAQVSGQGDSLHEHIANLAGSPAIKKGILQTVKVVDELVKVMGRHKPENIVIEMARENQTTQKGQKNSRERMKRIEEGIKELGSQILKEHPVENTQLQNEKLYLYYLQNGRDMYVDQELDINRLSDYDVDHIVPQSFLKDDSIDNKVLTRSDKNRGKSDNVPSEEVVKKMKNYWRQLLNAKLITQRKFDNLTKAERGGLSELDKAGFIKRQLVETRQITKHVAQILDSRMNTKYDENDKLIREVKVITLKSKLVSDFRKDFQFYKVREINNYHHAHDAYLNAVVGTALIKKYPKLESEFVYGDYKVYDVRKMIAKSEQEIGKATAKYFFYSNIMNFFKTEITLANGEIRKRPLIETNGETGEIVWDKGRDFATVRKVLSMPQVNIVKKTEVQTGGFSKESILPKRNSDKLIARKKDWDPKKYGGFDSPTVAYSVLVVAKVEKGKSKKLKSVKELLGITIMERSSFEKNPIDFLEAKGYKEVKKDLIIKLPKYSLFELENGRKRMLASAGELQKGNELALPSKYVNFLYLASHYEKLKGSPEDNEQKQLFVEQHKHYLDEIIEQISEFSKRVILADANLDKVLSAYNKHRDKPIREQAENIIHLFTLTNLGAPAAFKYFDTTIDRKRYTSTKEVLDATLIHQSITGLYETRIDLSQLGGD

SEQ ID NO: 171 - protein, 1554 aa, Artificial Sequence
  Description of Artificial Sequence: Synthetic polypeptide
MDKKYSIGLAIGTNSVGWAVITDEYKVPSKKFKVLGNTDRHSIKKNLIGALLFDSGETAEATRLKRTARRRYTRRKNRICYLQEIFSNEMAKVDDSFFHRLEESFLVEEDKKHERHPIFGNIVDEVAYHEKYPTIYHLRKKLVDSTDKADLRLIYLALAHMIKFRGHFLIEGDLNPDNSDVDKLFIQLVQTYNQLFEENPINASGVDAKAILSARLSKSRRLENLIAQLPGEKKNGLFGNLIALSLGLTPNFKSNFDLAEDAKLQLSKDTYDDDLDNLLAQIGDQYADLFLAAKNLSDAILLSDILRVNTEITKAPLSASMIKRYDEHHQDLTLLKALVRQQLPEKYKEIFFDQSKNGYAGYIDGGASQEEFYKFIKPILEKMDGTEELLVKLNREDLLRKQRTFDNGSIPHQIHLGELHAILRRQEDFYPFLKDNREKIEKILTFRIPYYVGPLARGNSRFAWMTRKSEETITPWNFEEVVDKGASAQSFIERMTNFDKNLPNEKVLPKHSLLYEYFTVYNELTKVKYVTEGMRKPAFLSGEQKKAIVDLLFKTNRKVTVKQLKEDYFKKIECFDSVEISGVEDRFNASLGTYHDLLKIIKDKDFLDNEENEDILEDIVLTLTLFEDREMIEERLKTYAHLFDDKVMKQLKRRRYTGWGRLSRKLINGIRDKQSGKTILDFLKSDGFANRNFMQLIHDDSLTFKEDIQKAQVSGQGDSLHEHIANLAGSPAIKKGILQTVKVVDELVKVMGRHKPENIVIEMARENQTTQKGQKNSRERMKRIEEGIKELGSQILKEHPVENTQLQNEKLYLYYLQNGRDMYVDQELDINRLSDYDVDHIVPQSFLKDDSIDNKVLTRSDKNRGKSDNVPSEEVVKKMKNYWRQLLNAKLITQRKFDNLTKAERGGLSELDKAGFIKRQLVETRQITKHVAQILDSRMNTKYDENDKLIREVKVITLKSKLVSDFRKDFQFYKVREINNYHHAHDAYLNAVVGTALIKKYPKLESEFVYGDYKVYDVRKMIAKSEQEIGKATAKYFFYSNIMNFFKTEITLANGEIRKRPLIETNGETGEIVWDKGRDFATVRKVLSMPQVNIVKKTEVQTGGFSKESILPKRNSDKLIARKKDWDPKKYGGFDSPTVAYSVLVVAKVEKGKSKKLKSVKELLGITIMERSSFEKNPIDFLEAKGYKEVKKDLIIKLPKYSLFELENGRKRMLASAGELQKGNELALPSKYVNFLYLASHYEKLKGSMNHRVEITEGILADECAALLCYFFRMPRQVFNAQKKAQSSTDGSSGSETPGTSESATPESSGSEVEFSHEYWMRHALTLAKRARDEREVPVGAVLVLNNRVIGEGWNRAIGLHDPTAHAEIMALRQGGLVMQNYRLIDATLYVTFEPCVMCAGAMIHSRIGRVVFGVRNAKTGAAGSLMDVLHYPGPEDNEQKQLFVEQHKHYLDEIIEQISEFSKRVILADANLDKVLSAYNKHRDKPIREQAENIIHLFTLTNLGAPAAFKYFDTTIDRKRYTSTKEVLDATLIHQSITGLYETRIDLSQLGGD

SEQ ID NO: 172 - protein, 1554 aa, Artificial Sequence
  Description of Artificial Sequence: Synthetic polypeptide
MDKKYSIGLAIGTNSVGWAVITDEYKVPSKKFKVLGNTDRHSIKKNLIGALLFDSGETAEATRLKRTARRRYTRRKNRICYLQEIFSNEMAKVDDSFFHRLEESFLVEEDKKHERHPIFGNIVDEVAYHEKYPTIYHLRKKLVDSTDKADLRLIYLALAHMIKFRGHFLIEGDLNPDNSDVDKLFIQLVQTYNQLFEENPINASGVDAKAILSARLSKSRRLENLIAQLPGEKKNGLFGNLIALSLGLTPNFKSNFDLAEDAKLQLSKDTYDDDLDNLLAQIGDQYADLFLAAKNLSDAILLSDILRVNTEITKAPLSASMIKRYDEHHQDLTLLKALVRQQLPEKYKEIFFDQSKNGYAGYIDGGASQEEFYKFIKPILEKMDGTEELLVKLNREDLLRKQRTFDNGSIPHQIHLGELHAILRRQEDFYPFLKDNREKIEKILTFRIPYYVGPLARGNSRFAWMTRKSEETITPWNFEEVVDKGASAQSFIERMTNFDKNLPNEKVLPKHSLLYEYFTVYNELTKVKYVTEGMRKPAFLSGEQKKAIVDLLFKTNRKVTVKQLKEDYFKKIECFDSVEISGVEDRFNASLGTYHDLLKIIKDKDFLDNEENEDILEDIVLTLTLFEDREMIEERLKTYAHLFDDKVMKQLKRRRYTGWGRLSRKLINGIRDKQSGKTILDFLKSDGFANRNFMQLIHDDSLTFKEDIQKAQVSGQGDSLHEHIANLAGSPAIKKGILQTVKVVDELVKVMGRHKPENIVIEMARENQTTQKGQKNSRERMKRIEEGIKELGSQILKEHPVENTQLQNEKLYLYYLQNGRDMYVDQELDINRLSDYDVDHIVPQSFLKDDSIDNKVLTRSDKNRGKSDNVPSEEVVKKMKNYWRQLLNAKLITQRKFDNLTKAERGGLSELDKAGFIKRQLVETRQITKHVAQILDSRMNTKYDENDKLIREVKVITLKSKLVSDFRKDFQFYKVREINNYHHAHDAYLNAVVGTALIKKYPKLESEFVYGDYKVYDVRKMIAKSEQEIGKATAKYFFYSNIMNFFKTEITLAMNHRVEITEGILADECAALLCYFFRMPRQVFNAQKKAQSSTDGSSGSETPGTSESATPESSGSEVEFSHEYWMRHALTLAKRARDEREVPVGAVLVLNNRVIGEGWNRAIGLHDPTAHAEIMALRQGGLVMQNYRLIDATLYVTFEPCVMCAGAMIHSRIGRVVFGVRNAKTGAAGSLMDVLHYPGNGEIRKRPLIETNGETGEIVWDKGRDFATVRKVLSMPQVNIVKKTEVQTGGFSKESILPKRNSDKLIARKKDWDPKKYGGFDSPTVAYSVLVVAKVEKGKSKKLKSVKELLGITIMERSSFEKNPIDFLEAKGYKEVKKDLIIKLPKYSLFELENGRKRMLASAGELQKGNELALPSKYVNFLYLASHYEKLKGSPEDNEQKQLFVEQHKHYLDEIIEQISEFSKRVILADANLDKVLSAYNKHRDKPIREQAENIIHLFTLTNLGAPAAFKYFDTTIDRKRYTSTKEVLDATLIHQSITGLYETRIDLSQLGGD

SEQ ID NO: 173 - protein, 1554 aa, Artificial Sequence
  Description of Artificial Sequence: Synthetic polypeptide
MDKKYSIGLAIGTNSVGWAVITDEYKVPSKKFKVLGNTDRHSIKKNLIGALLFDSGETAEATRLKRTARRRYTRRKNRICYLQEIFSNEMAKVDDSFFHRLEESFLVEEDKKHERHPIFGNIVDEVAYHEKYPTIYHLRKKLVDSTDKADLRLIYLALAHMIKFRGHFLIEGDLNPDNSDVDKLFIQLVQTYNQLFEENPINASGVDAKAILSARLSKSRRLENLIAQLPGEKKNGLFGNLIALSLGLTPNFKSNFDLAEDAKLQLSKDTYDDDLDNLLAQIGDQYADLFLAAKNLSDAILLSDILRVNTEITKAPLSASMIKRYDEHHQDLTLLKALVRQQLPEKYKEIFFDQSKNGYAGYIDGGASQEEFYKFIKPILEKMDGTEELLVKLNREDLLRKQRTFDNGSIPHQIHLGELHAILRRQEDFYPFLKDNREKIEKILTFRIPYYVGPLARGNSRFAWMTRKSEETITPWNFEEVVDKGASAQSFIERMTNFDKNLPNEKVLPKHSLLYEYFTVYNELTKVKYVTEGMRKPAFLSGEQKKAIVDLLFKTNRKVTVKQLKEDYFKKIECFDSVEISGVEDRFNASLGTYHDLLKIIKDKDFLDNEENEDILEDIVLTLTLFEDREMIEERLKTYAHLFDDKVMKQLKRRRYTGWGRLSRKLINGIRDKQSGKTILDFLKSDGFANRNFMQLIHDDSLTFKEDIQKAQVSGQGDSLHEHIANLAGSPAIKKGILQTVKVVDELVKVMGRHKPENIVIEMARENQTTQKGQKNSRERMKRIEEGIKELGSQILKEHPVENTQLQNEKLYLYYLQNGRDMYVDQELDINRLSDYDVDHIVPQSFLKDDSIDNKVLTRSDKNRGKSDNVPSEEVVKKMKNYWRQLLNAKLITQRKFDNLTKAERGGLSELDKAGFIKRQLVETRQITKHVAQILDSRMNTKYDENDKLIREVKVITLKSKLVSDFRKDFQFYKVREINNYHHAHDAYLNAVVGTALIKKYPKLESEFVYGDYKVYDVRKMIAKSEQEIGKATAKYFFYSMNHRVEITEGILADECAALLCYFFRMPRQVFNAQKKAQSSTDGSSGSETPGTSESATPESSGSEVEFSHEYWMRHALTLAKRARDEREVPVGAVLVLNNRVIGEGWNRAIGLHDPTAHAEIMALRQGGLVMQNYRLIDATLYVTFEPCVMCAGAMIHSRIGRVVFGVRNAKTGAAGSLMDVLHYPGNIMNFFKTEITLANGEIRKRPLIETNGETGEIVWDKGRDFATVRKVLSMPQVNIVKKTEVQTGGFSKESILPKRNSDKLIARKKDWDPKKYGGFDSPTVAYSVLVVAKVEKGKSKKLKSVKELLGITIMERSSFEKNPIDFLEAKGYKEVKKDLIIKLPKYSLFELENGRKRMLASAGELQKGNELALPSKYVNFLYLASHYEKLKGSPEDNEQKQLFVEQHKHYLDEIIEQISEFSKRVILADANLDKVLSAYNKHRDKPIREQAENIIHLFTLTNLGAPAAFKYFDTTIDRKRYTSTKEVLDATLIHQSITGLYETRIDLSQLGGD

SEQ ID NO: 174 - protein, 1554 aa, Artificial Sequence
  Description of Artificial Sequence: Synthetic polypeptide
MDKKYSIGLAIGTNSVGWAVITDEYKVPSKKFKVLGNTDRHSIKKNLIGALLFDSGETAEATRLKRTARRRYTRRKNRICYLQEIFSNEMAKVDDSFFHRLEESFLVEEDKKHERHPIFGNIVDEVAYHEKYPTIYHLRKKLVDSTDKADLRLIYLALAHMIKFRGHFLIEGDLNPDNSDVDKLFIQLVQTYNQLFEENPINASGVDAKAILSARLSKSRRLENLIAQLPGEKKNGLFGNLIALSLGLTPNFKSNFDLAEDAKLQLSKDTYDDDLDNLLAQIGDQYADLFLAAKNLSDAILLSDILRVNTEITKAPLSASMIKRYDEHHQDLTLLKALVRQQLPEKYKEIFFDQSKNGYAGYIDGGASQEEFYKFIKPILEKMDGTEELLVKLNREDLLRKQRTFDNGSIPHQIHLGELHAILRRQEDFYPFLKDNREKIEKILTFRIPYYVGPLARGNSRFAWMTRKSEETITPWNFEEVVDKGASAQSFIERMTNFDKNLPNEKVLPKHSLLYEYFTVYNELTKVKYVTEGMRKPAFLSGEQKKAIVDLLFKTNRKVTVKQLKEDYFKKIECFDSVEISGVEDRFNASLGTYHDLLKIIKDKDFLDNEENEDILEDIVLTLTLFEDREMIEERLKTYAHLFDDKVMKQLKRRRYTGWGRLSRKLINGIRDKQSGKTILDFLKSDGFANRNFMQLIHDDSLTFKEDIQKAQVSGQGDSLHEHIANLAGSPAIKKGILQTVKVVDELVKVMGRHKPENIVIEMARENQTTQKGQKNSRERMKRIEEGIKELGSQILKEHPVENTQLQNEKLYLYYLQNGRDMYVDQELDINRLSDYDVDHIVPQSFLKDDSIDNKVLTRSDKNRGKSDNVPSEEVVKKMKNYWRQLLNAKLITQRKFDNLTKAERGGLSELDKAGFIKRQLVETRQITKHVAQILDSRMNTKYDENDKLIREVKVITLKSKLVSDFRKDFQFYKVREINNYHHAHDAYLNAVVGTALIKKYPKLESEFVYGDYKVYDVRKMIAKSEQEIGKATAKYFFYSNIMNFFKTEITLANGEIRKRPLIETNGETGEIVWDKGRDFATVRKVLSMPQVNIVKKTEVQTGGFSKESILPKRNSDKLIARKKDWDPKKYGGFDSPTVAYSVLVVAKVEKGKSKKLKSVKELLGITIMERSSFEKNPIDFLEAKGYKEVKKDLIIKLPKYSLFELENGRKRMLASAGELQKGNELALPSKYVNFLYLASHYEKLKGSPEDNEQKQLFVEQHKHYLDEIIEQISEFSKRVILADANLDKVLSAYNKHRMNHRVEITEGILADECAALLCYFFRMPRQVFNAQKKAQSSTDGSSGSETPGTSESATPESSGSEVEFSHEYWMRHALTLAKRARDEREVPVGAVLVLNNRVIGEGWNRAIGLHDPTAHAEIMALRQGGLVMQNYRLIDATLYVTFEPCVMCAGAMIHSRIGRVVFGVRNAKTGAAGSLMDVLHYPGDKPIREQAENIIHLFTLTNLGAPAAFKYFDTTIDRKRYTSTKEVLDATLIHQSITGLYETRIDLSQLGGD

SEQ ID NO: 175 - protein, 1454 aa, Artificial Sequence
  Description of Artificial Sequence: Synthetic polypeptide
MDKKYSIGLAIGTNSVGWAVITDEYKVPSKKFKVLGNTDRHSIKKNLIGALLFDSGETAEATRLKRTARRRYTRRKNRICYLQEIFSNEMAKVDDSFFHRLEESFLVEEDKKHERHPIFGNIVDEVAYHEKYPTIYHLRKKLVDSTDKADLRLIYLALAHMIKFRGHFLIEGDLNPDNSDVDKLFIQLVQTYNQLFEENPINASGVDAKAILSARLSKSRRLENLIAQLPGEKKNGLFGNLIALSLGLTPNFKSNFDLAEDAKLQLSKDTYDDDLDNLLAQIGDQYADLFLAAKNLSDAILLSDILRVNTEITKAPLSASMIKRYDEHHQDLTLLKALVRQQLPEKYKEIFFDQSKNGYAGYIDGGASQEEFYKFIKPILEKMDGTEELLVKLNREDLLRKQRTFDNGSIPHQIHLGELHAILRRQEDFYPFLKDNREKIEKILTFRIPYYVGPLARGNSRFAWMTRKSEETITPWNFEEVVDKGASAQSFIERMTNFDKNLPNEKVLPKHSLLYEYFTVYNELTKVKYVTEGMRKPAFLSGEQKKAIVDLLFKTNRKVTVKQLKEDYFKKIECFDSVEISGVEDRFNASLGTYHDLLKIIKDKDFLDNEENEDILEDIVLTLTLFEDREMIEERLKTYAHLFDDKVMKQLKRRRYTGWGRLSRKLINGIRDKQSGKTILDFLKSDGFANRNFMQLIHDDSLTFKEDIQKAQVSGQGDSLHEHIANLAGSPAIKKGILQTVKVVDELVKVMGRHKPENIVIEMARENQTTQKGQKNSRERMKRIEEGIKELGSEVEFSHEYWMRHALTLAKRARDEREVPVGAVLVLNNRVIGEGWNRAIGLHDPTAHAEIMALRQGGLVMQNYRLIDATLYVTFEPCVMCAGAMIHSRIGRVVFGVRNAKTGAAGSLMDVLHYPGMNHRVEITEGILADECAALLCYFFRMPRQVFNAQKKAQSSTDEEVVKKMKNYWRQLLNAKLITQRKFDNLTKAERGGLSELDKAGFIKRQLVETRQITKHVAQILDSRMNTKYDENDKLIREVKVITLKSKLVSDFRKDFQFYKVREINNYHHAHDAYLNAVVGTALIKKYPKLESEFVYGDYKVYDVRKMIAKSEQEIGKATAKYFFYSNIMNFFKTEITLANGEIRKRPLIETNGETGEIVWDKGRDFATVRKVLSMPQVNIVKKTEVQTGGFSKESILPKRNSDKLIARKKDWDPKKYGGFDSPTVAYSVLVVAKVEKGKSKKLKSVKELLGITIMERSSFEKNPIDFLEAKGYKEVKKDLIIKLPKYSLFELENGRKRMLASAGELQKGNELALPSKYVNFLYLASHYEKLKGSPEDNEQKQLFVEQHKHYLDEIIEQISEFSKRVILADANLDKVLSAYNKHRDKPIREQAENIIHLFTLTNLGAPAAFKYFDTTIDRKRYTSTKEVLDATLIHQSITGLYETRIDLSQLGGD

SEQ ID NO: 176 - protein, 1420 aa, Artificial Sequence
  Description of Artificial Sequence: Synthetic polypeptide
MDKKYSIGLAIGTNSVGWAVITDEYKVPSKKFKVLGNTDRHSIKKNLIGALLFDSGETAEATRLKRTARRRYTRRKNRICYLQEIFSNEMAKVDDSFFHRLEESFLVEEDKKHERHPIFGNIVDEVAYHEKYPTIYHLRKKLVDSTDKADLRLIYLALAHMIKFRGHFLIEGDLNPDNSDVDKLFIQLVQTYNQLFEENPINASGVDAKAILSARLSKSRRLENLIAQLPGEKKNGLFGNLIALSLGLTPNFKSNFDLAEDAKLQLSKDTYDDDLDNLLAQIGDQYADLFLAAKNLSDAILLSDILRVNTEITKAPLSASMIKRYDEHHQDLTLLKALVRQQLPEKYKEIFFDQSKNGYAGYIDGGASQEEFYKFIKPILEKMDGTEELLVKLNREDLLRKQRTFDNGSIPHQIHLGELHAILRRQEDFYPFLKDNREKIEKILTFRIPYYVGPLARGNSRFAWMTRKSEETITPWNFEEVVDKGASAQSFIERMTNFDKNLPNEKVLPKHSLLYEYFTVYNELTKVKYVTEGMRKPAFLSGEQKKAIVDLLFKTNRKVTVKQLKEDYFKKIECFDSVEISGVEDRFNASLGTYHDLLKIIKDKDFLDNEENEDILEDIVLTLTLFEDREMIEERLKTYAHLFDDKVMKQLKRRRYTGWGRLSRKLINGIRDKQSGKTILDFLKSDGFANRNFMQLIHDDSLTFKEDIQKAQVSGQGDSLHEHIANLAGSPAIKKGILQTVKVVDELVKVMGRHKPENIVIEMARENQTTQKGQKNSRERMKRIEEGIKELGSEVEFSHEYWMRHALTLAKRARDEREVPVGAVLVLNNRVIGEGWNRAIGLHDPTAHAEIMALRQGGLVMQNYRLIDATLYVTFEPCVMCAGAMIHSRIGRVVFGVRNAKTGAAGSLMDVLHYPGMNHRVEITEGILADECAALLCYFFRMPRQVFNAQKKAQSSTDGLSELDKAGFIKRQLVETRQITKHVAQILDSRMNTKYDENDKLIREVKVITLKSKLVSDFRKDFQFYKVREINNYHHAHDAYLNAVVGTALIKKYPKLESEFVYGDYKVYDVRKMIAKSEQEIGKATAKYFFYSNIMNFFKTEITLANGEIRKRPLIETNGETGEIVWDKGRDFATVRKVLSMPQVNIVKKTEVQTGGFSKESILPKRNSDKLIARKKDWDPKKYGGFDSPTVAYSVLVVAKVEKGKSKKLKSVKELLGITIMERSSFEKNPIDFLEAKGYKEVKKDLIIKLPKYSLFELENGRKRMLASAGELQKGNELALPSKYVNFLYLASHYEKLKGSPEDNEQKQLFVEQHKHYLDEIIEQISEFSKRVILADANLDKVLSAYNKHRDKPIREQAENIIHLFTLTNLGAPAAFKYFDTTIDRKRYTSTKEVLDATLIHQSITGLYETRIDLSQLGGD

SEQ ID NO: 177 - protein, 1554 aa, Artificial Sequence
  Description of Artificial Sequence: Synthetic polypeptide
MDKKYSIGLAIGTNSVGWAVITDEYKVPSKKFKVLGNTDRHSIKKNLIGALLFDSGETAEATRLKRTARRRYTRRKNRICYLQEIFSNEMAKVDDSFFHRLEESFLVEEDKKHERHPIFGNIVDEVAYHEKYPTIYHLRKKLVDSTDKADLRLIYLALAHMIKFRGHFLIEGDLNPDNSDVDKLFIQLVQTYNQLFEENPINASGVDAKAILSARLSKSRRLENLIAQLPGEKKNGLFGNLIALSLGLTPNFKSNFDLAEDAKLQLSKDTYDDDLDNLLAQIGDQYADLFLAAKNLSDAILLSDILRVNTEITKAPLSASMIKRYDEHHQDLTLLKALVRQQLPEKYKEIFFDQSKNGYAGYIDGGASQEEFYKFIKPILEKMDGTEELLVKLNREDLLRKQRTFDNGSIPHQIHLGELHAILRRQEDFYPFLKDNREKIEKILTFRIPYYVGPLARGNSRFAWMTRKSEETITPWNFEEVVDKGASAQSFIERMTNFDKNLPNEKVLPKHSLLYEYFTVYNELTKVKYVTEGMRKPAFLSGEQKKAIVDLLFKTNRKVTVKQLKEDYFKKIECFDSVEISGVEDRFNASLGTYHDLLKIIKDKDFLDNEENEDILEDIVLTLTLFEDREMIEERLKTYAHLFDDKVMKQLKRRRYTGWGRLSRKLINGIRDKQSGKTILDFLKSDGFANRNFMQLIHDDSLTFKEDIQKAQVSGQGDSLHEHIANLAGSPAIKKGILQTVKVVDELVKVMGRHKPENIVIEMARENQTTQKGQKNSRERMKRIEEGIKELGSQILKEHPVENTQLQNEKLYLYYLQNGRDMYVDQELDINRLSDYDVDHIVPQSFLKDDSIDNKVLTRSDKNRGKSDNVPSEEVVKKMKNYWRQLLNAKLITQRKFDNLTKAERGGLSELDKAGFIKRQLVETRQITKHVAQILDSRMNTKYDENDKLIREVKVITLKSKLVSDFRKDFQFYKVREINNYHHAHDAYLNAVVGTALIKKYPKTAHAEIMALRQGGLVMQNYRLIDATLYVTFEPCVMCAGAMIHSRIGRVVFGVRNAKTGAAGSLMDVLHYPGMNHRVEITEGILADECAALLCYFFRMPRQVFNAQKKAQSSTDGSSGSETPGTSESATPESSGSEVEFSHEYWMRHALTLAKRARDEREVPVGAVLVLNNRVIGEGWNRAIGLHDPLESEFVYGDYKVYDVRKMIAKSEQEIGKATAKYFFYSNIMNFFKTEITLANGEIRKRPLIETNGETGEIVWDKGRDFATVRKVLSMPQVNIVKKTEVQTGGFSKESILPKRNSDKLIARKKDWDPKKYGGFDSPTVAYSVLVVAKVEKGKSKKLKSVKELLGITIMERSSFEKNPIDFLEAKGYKEVKKDLIIKLPKYSLFELENGRKRMLASAGELQKGNELALPSKYVNFLYLASHYEKLKGSPEDNEQKQLFVEQHKHYLDEIIEQISEFSKRVILADANLDKVLSAYNKHRDKPIREQAENIIHLFTLTNLGAPAAFKYFDTTIDRKRYTSTKEVLDATLIHQSITGLYETRIDLSQLGGD

SEQ ID NO: 178 - protein, 1554 aa, Artificial Sequence
  Description of Artificial Sequence: Synthetic polypeptide
MDKKYSIGLAIGTNSVGWAVITDEYKVPSKKFKVLGNTDRHSIKKNLIGALLFDSGETAEATRLKRTARRRYTRRKNRICYLQEIFSNEMAKVDDSFFHRLEESFLVEEDKKHERHPIFGNIVDEVAYHEKYPTIYHLRKKLVDSTDKADLRLIYLALAHMIKFRGHFLIEGDLNPDNSDVDKLFIQLVQTYNQLFEENPINASGVDAKAILSARLSKSRRLENLIAQLPGEKKNGLFGNLIALSLGLTPNFKSNFDLAEDAKLQLSKDTYDDDLDNLLAQIGDQYADLFLAAKNLSDAILLSDILRVNTEITKAPLSASMIKRYDEHHQDLTLLKALVRQQLPEKYKEIFFDQSKNGYAGYIDGGASQEEFYKFIKPILEKMDGTEELLVKLNREDLLRKQRTFDNGSIPHQIHLGELHAILRRQEDFYPFLKDNREKIEKILTFRIPYYVGPLARGNSRFAWMTRKSEETITPWNFEEVVDKGASAQSFIERMTNFDKNLPNEKVLPKHSLLYEYFTVYNELTKVKYVTEGMRKPAFLSGEQKKAIVDLLFKTNRKVTVKQLKEDYFKKIECFDSVEISGVEDRFNASLGTYHDLLKIIKDKDFLDNEENEDILEDIVLTLTLFEDREMIEERLKTYAHLFDDKVMKQLKRRRYTGWGRLSRKLINGIRDKQSGKTILDFLKSDGFANRNFMQLIHDDSLTFKEDIQKAQVSGQGDSLHEHIANLAGSPAIKKGILQTVKVVDELVKVMGRHKPENIVIEMARENQTTQKGQKNSRERMKRIEEGIKELGSQILKEHPVENTQLQNEKLYLYYLQNGRDMYVDQELDINRLSDYDVDHIVPQSFLKDDSIDNKVLTRSDKNRGKSDNVPSEEVVKKMKNYWRQLLNAKLITQRKFDNLTKAERGGLSELDKAGFIKRQLVETRQITKHVAQILDSRMNTKYDENDKLIREVKVITLKSKLVSDFRKDFQFYKVREINNYHHAHDAYLNAVVGTALIKKYPKLESEFVYGDYKVTAHAEIMALRQGGLVMQNYRLIDATLYVTFEPCVMCAGAMIHSRIGRVVFGVRNAKTGAAGSLMDVLHYPGMNHRVEITEGILADECAALLCYFFRMPRQVFNAQKKAQSSTDGSSGSETPGTSESATPESSGSEVEFSHEYWMRHALTLAKRARDEREVPVGAVLVLNNRVIGEGWNRAIGLHDPYDVRKMIAKSEQEIGKATAKYFFYSNIMNFFKTEITLANGEIRKRPLIETNGETGEIVWDKGRDFATVRKVLSMPQVNIVKKTEVQTGGFSKESILPKRNSDKLIARKKDWDPKKYGGFDSPTVAYSVLVVAKVEKGKSKKLKSVKELLGITIMERSSFEKNPIDFLEAKGYKEVKKDLIIKLPKYSLFELENGRKRMLASAGELQKGNELALPSKYVNFLYLASHYEKLKGSPEDNEQKQLFVEQHKHYLDEIIEQISEFSKRVILADANLDKVLSAYNKHRDKPIREQAENIIHLFTLTNLGAPAAFKYFDTTIDRKRYTSTKEVLDATLIHQSITGLYETRIDLSQLGGD

SEQ ID NO: 179 - protein, 1554 aa, Artificial Sequence
  Description of Artificial Sequence: Synthetic polypeptide
MDKKYSIGLAIGTNSVGWAVITDEYKVPSKKFKVLGNTDRHSIKKNLIGALLFDSGETAEATRLKRTARRRYTRRKNRICYLQEIFSNEMAKVDDSFFHRLEESFLVEEDKKHERHPIFGNIVDEVAYHEKYPTIYHLRKKLVDSTDKADLRLIYLALAHMIKFRGHFLIEGDLNPDNSDVDKLFIQLVQTYNQLFEENPINASGVDAKAILSARLSKSRRLENLIAQLPGEKKNGLFGNLIALSLGLTPNFKSNFDLAEDAKLQLSKDTYDDDLDNLLAQIGDQYADLFLAAKNLSDAILLSDILRVNTEITKAPLSASMIKRYDEHHQDLTLLKALVRQQLPEKYKEIFFDQSKNGYAGYIDGGASQEEFYKFIKPILEKMDGTEELLVKLNREDLLRKQRTFDNGSIPHQIHLGELHAILRRQEDFYPFLKDNREKIEKILTFRIPYYVGPLARGNSRFAWMTRKSEETITPWNFEEVVDKGASAQSFIERMTNFDKNLPNEKVLPKHSLLYEYFTVYNELTKVKYVTEGMRKPAFLSGEQKKAIVDLLFKTNRKVTVKQLKEDYFKKIECFDSVEISGVEDRFNASLGTYHDLLKIIKDKDFLDNEENEDILEDIVLTLTLFEDREMIEERLKTYAHLFDDKVMKQLKRRRYTGWGRLSRKLINGIRDKQSGKTILDFLKSDGFANRNFMQLIHDDSLTFKEDIQKAQVSGQGDSLHEHIANLAGSPAIKKGILQTVKVVDELVKVMGRHKPENIVIEMARENQTTQKGQKNSRERMKRIEEGIKELGSQILKEHPVENTQLQNEKLYLYYLQNGRDMYVDQELDINRLSDYDVDHIVPQSFLKDDSIDNKVLTRSDKNRGKSDNVPSEEVVKKMKNYWRQLLNAKLITQRKFDNLTKAERGGLSELDKAGFIKRQLVETRQITKHVAQILDSRMNTKYDENDKLIREVKVITLKSKLVSDFRKDFQFYKVREINNYHHAHDAYLNAVVGTALIKKYPKLESEFVYGDYKVYDVRKMITAHAEIMALRQGGLVMQNYRLIDATLYVTFEPCVMCAGAMIHSRIGRVVFGVRNAKTGAAGSLMDVLHYPGMNHRVEITEGILADECAALLCYFFRMPRQVFNAQKKAQSSTDGSSGSETPGTSESATPESSGSEVEFSHEYWMRHALTLAKRARDEREVPVGAVLVLNNRVIGEGWNRAIGLHDPAKSEQEIGKATAKYFFYSNIMNFFKTEITLANGEIRKRPLIETNGETGEIVWDKGRDFATVRKVLSMPQVNIVKKTEVQTGGFSKESILPKRNSDKLIARKKDWDPKKYGGFDSPTVAYSVLVVAKVEKGKSKKLKSVKELLGITIMERSSFEKNPIDFLEAKGYKEVKKDLIIKLPKYSLFELENGRKRMLASAGELQKGNELALPSKYVNFLYLASHYEKLKGSPEDNEQKQLFVEQHKHYLDEIIEQISEFSKRVILADANLDKVLSAYNKHRDKPIREQAENIIHLFTLTNLGAPAAFKYFDTTIDRKRYTSTKEVLDATLIHQSITGLYETRIDLSQLGGD

SEQ ID NO: 180 - protein, 1554 aa, Artificial Sequence
  Description of Artificial Sequence: Synthetic polypeptide
MDKKYSIGLAIGTNSVGWAVITDEYKVPSKKFKVLGNTDRHSIKKNLIGALLFDSGETAEATRLKRTARRRYTRRKNRICYLQEIFSNEMAKVDDSFFHRLEESFLVEEDKKHERHPIFGNIVDEVAYHEKYPTIYHLRKKLVDSTDKADLRLIYLALAHMIKFRGHFLIEGDLNPDNSDVDKLFIQLVQTYNQLFEENPINASGVDAKAILSARLSKSRRLENLIAQLPGEKKNGLFGNLIALSLGLTPNFKSNFDLAEDAKLQLSKDTYDDDLDNLLAQIGDQYADLFLAAKNLSDAILLSDILRVNTEITKAPLSASMIKRYDEHHQDLTLLKALVRQQLPEKYKEIFFDQSKNGYAGYIDGGASQEEFYKFIKPILEKMDGTEELLVKLNREDLLRKQRTFDNGSIPHQIHLGELHAILRRQEDFYPFLKDNREKIEKILTFRIPYYVGPLARGNSRFAWMTRKSEETITPWNFEEVVDKGASAQSFIERMTNFDKNLPNEKVLPKHSLLYEYFTVYNELTKVKYVTEGMRKPAFLSGEQKKAIVDLLFKTNRKVTVKQLKEDYFKKIECFDSVEISGVEDRFNASLGTYHDLLKIIKDKDFLDNEENEDILEDIVLTLTLFEDREMIEERLKTYAHLFDDKVMKQLKRRRYTGWGRLSRKLINGIRDKQSGKTILDFLKSDGFANRNFMQLIHDDSLTFKEDIQKAQVSGQGDSLHEHIANLAGSPAIKKGILQTVKVVDELVKVMGRHKPENIVIEMARENQTTQKGQKNSRERMKRIEEGIKELGSQILKEHPVENTQLQNEKLYLYYLQNGRDMYVDQELDINRLSDYDVDHIVPQSFLKDDSIDNKVLTRSDKNRGKSDNVPSEEVVKKMKNYWRQLLNAKLITQRKFDNLTKAERGGLSELDKAGFIKRQLVETRQITKHVAQILDSRMNTKYDENDKLIREVKVITLKSKLVSDFRKDFQFYKVREINNYHHAHDAYLNAVVGTALIKKYPKLESEFVYGDYKVYDVRKMIAKSEQEITAHAEIMALRQGGLVMQNYRLIDATLYVTFEPCVMCAGAMIHSRIGRVVFGVRNAKTGAAGSLMDVLHYPGMNHRVEITEGILADECAALLCYFFRMPRQVFNAQKKAQSSTDGSSGSETPGTSESATPESSGSEVEFSHEYWMRHALTLAKRARDEREVPVGAVLVLNNRVIGEGWNRAIGLHDPGKATAKYFFYSNIMNFFKTEITLANGEIRKRPLIETNGETGEIVWDKGRDFATVRKVLSMPQVNIVKKTEVQTGGFSKESILPKRNSDKLIARKKDWDPKKYGGFDSPTVAYSVLVVAKVEKGKSKKLKSVKELLGITIMERSSFEKNPIDFLEAKGYKEVKKDLIIKLPKYSLFELENGRKRMLASAGELQKGNELALPSKYVNFLYLASHYEKLKGSPEDNEQKQLFVEQHKHYLDEIIEQISEFSKRVILADANLDKVLSAYNKHRDKPIREQAENIIHLFTLTNLGAPAAFKYFDTTIDRKRYTSTKEVLDATLIHQSITGLYETRIDLSQLGGD

SEQ ID NO: 181 - protein, 1554 aa, Artificial Sequence
  Description of Artificial Sequence: Synthetic polypeptide
MDKKYSIGLAIGTNSVGWAVITDEYKVPSKKFKVLGNTDRHSIKKNLIGALLFDSGETAEATRLKRTARRRYTRRKNRICYLQEIFSNEMAKVDDSFFHRLEESFLVEEDKKHERHPIFGNIVDEVAYHEKYPTIYHLRKKLVDSTDKADLRLIYLALAHMIKFRGHFLIEGDLNPDNSDVDKLFIQLVQTYNQLFEENPINASGVDAKAILSARLSKSRRLENLIAQLPGEKKNGLFGNLIALSLGLTPNFKSNFDLAEDAKLQLSKDTYDDDLDNLLAQIGDQYADLFLAAKNLSDAILLSDILRVNTEITKAPLSASMIKRYDEHHQDLTLLKALVRQQLPEKYKEIFFDQSKNGYAGYIDGGASQEEFYKFIKPILEKMDGTEELLVKLNREDLLRKQRTFDNGSIPHQIHLGELHAILRRQEDFYPFLKDNREKIEKILTFRIPYYVGPLARGNSRFAWMTRKSEETITPWNFEEVVDKGASAQSFIERMTNFDKNLPNEKVLPKHSLLYEYFTVYNELTKVKYVTEGMRKPAFLSGEQKKAIVDLLFKTNRKVTVKQLKEDYFKKIECFDSVEISGVEDRFNASLGTYHDLLKIIKDKDFLDNEENEDILEDIVLTLTLFEDREMIEERLKTYAHLFDDKVMKQLKRRRYTGWGRLSRKLINGIRDKQSGKTILDFLKSDGFANRNFMQLIHDDSLTFKEDIQKAQVSGQGDSLHEHIANLAGSPAIKKGILQTVKVVDELVKVMGRHKPENIVIEMARENQTTQKGQKNSRERMKRIEEGIKELGSQILKEHPVENTQLQNEKLYLYYLQNGRDMYVDQELDINRLSDYDVDHIVPQSFLKDDSIDNKVLTRSDKNRGKSDNVPSEEVVKKMKNYWRQLLNAKLITQRKFDNLTKAERGGLSELDKAGFIKRQLVETRQITKHVAQILDSRMNTKYDENDKLIREVKVITLKSKLVSDFRKDFQFYKVREINNYHHAHDAYLNAVVGTALIKKYPKLESEFVYGDYKVYDVRKMIAKSEQEIGKATAKYFFYSTAHAEIMALRQGGLVMQNYRLIDATLYVTFEPCVMCAGAMIHSRIGRVVFGVRNAKTGAAGSLMDVLHYPGMNHRVEITEGILADECAALLCYFFRMPRQVFNAQKKAQSSTDGSSGSETPGTSESATPESSGSEVEFSHEYWMRHALTLAKRARDEREVPVGAVLVLNNRVIGEGWNRAIGLHDPNIMNFFKTEITLANGEIRKRPLIETNGETGEIVWDKGRDFATVRKVLSMPQVNIVKKTEVQTGGFSKESILPKRNSDKLIARKKDWDPKKYGGFDSPTVAYSVLVVAKVEKGKSKKLKSVKELLGITIMERSSFEKNPIDFLEAKGYKEVKKDLIIKLPKYSLFELENGRKRMLASAGELQKGNELALPSKYVNFLYLASHYEKLKGSPEDNEQKQLFVEQHKHYLDEIIEQISEFSKRVILADANLDKVLSAYNKHRDKPIREQAENIIHLFTLTNLGAPAAFKYFDTTIDRKRYTSTKEVLDATLIHQSITGLYETRIDLSQLGGD

SEQ ID NO: 182 - protein, 1554 aa, Artificial Sequence
  Description of Artificial Sequence: Synthetic polypeptide
MDKKYSIGLAIGTNSVGWAVITDEYKVPSKKFKVLGNTDRHSIKKNLIGALLFDSGETAEATRLKRTARRRYTRRKNRICYLQEIFSNEMAKVDDSFFHRLEESFLVEEDKKHERHPIFGNIVDEVAYHEKYPTIYHLRKKLVDSTDKADLRLIYLALAHMIKFRGHFLIEGDLNPDNSDVDKLFIQLVQTYNQLFEENPINASGVDAKAILSARLSKSRRLENLIAQLPGEKKNGLFGNLIALSLGLTPNFKSNFDLAEDAKLQLSKDTYDDDLDNLLAQIGDQYADLFLAAKNLSDAILLSDILRVNTEITKAPLSASMIKRYDEHHQDLTLLKALVRQQLPEKYKEIFFDQSKNGYAGYIDGGASQEEFYKFIKPILEKMDGTEELLVKLNREDLLRKQRTFDNGSIPHQIHLGELHAILRRQEDFYPFLKDNREKIEKILTFRIPYYVGPLARGNSRFAWMTRKSEETITPWNFEEVVDKGASAQSFIERMTNFDKNLPNEKVLPKHSLLYEYFTVYNELTKVKYVTEGMRKPAFLSGEQKKAIVDLLFKTNRKVTVKQLKEDYFKKIECFDSVEISGVEDRFNASLGTYHDLLKIIKDKDFLDNEENEDILEDIVLTLTLFEDREMIEERLKTYAHLFDDKVMKQLKRRRYTGWGRLSRKLINGIRDKQSGKTILDFLKSDGFANRNFMQLIHDDSLTFKEDIQKAQVSGQGDSLHEHIANLAGSPAIKKGILQTVKVVDELVKVMGRHKPENIVIEMARENQTTQKGQKNSRERMKRIEEGIKELGSQILKEHPVENTQLQNEKLYLYYLQNGRDMYVDQELDINRLSDYDVDHIVPQSFLKDDSIDNKVLTRSDKNRGKSDNVPSEEVVKKMKNYWRQLLNAKLITQRKFDNLTKAERGGLSELDKAGFIKRQLVETRQITKHVAQILDSRMNTKYDENDKLIREVKVITLKSKLVSDFRKDFQFYKVREINNYHHAHDAYLNAVVGTALIKKYPKLESEFVYGDYKVYDVRKMIAKSEQEIGKATAKYFFYSNIMNFFKTEITLANTAHAEIMALRQGGLVMQNYRLIDATLYVTFEPCVMCAGAMIHSRIGRVVFGVRNAKTGAAGSLMDVLHYPGMNHRVEITEGILADECAALLCYFFRMPRQVFNAQKKAQSSTDGSSGSETPGTSESATPESSGSEVEFSHEYWMRHALTLAKRARDEREVPVGAVLVLNNRVIGEGWNRAIGLHDPGEIRKRPLIETNGETGEIVWDKGRDFATVRKVLSMPQVNIVKKTEVQTGGFSKESILPKRNSDKLIARKKDWDPKKYGGFDSPTVAYSVLVVAKVEKGKSKKLKSVKELLGITIMERSSFEKNPIDFLEAKGYKEVKKDLIIKLPKYSLFELENGRKRMLASAGELQKGNELALPSKYVNFLYLASHYEKLKGSPEDNEQKQLFVEQHKHYLDEIIEQISEFSKRVILADANLDKVLSAYNKHRDKPIREQAENIIHLFTLTNLGAPAAFKYFDTTIDRKRYTSTKEVLDATLIHQSITGLYETRIDLSQLGGD

SEQ ID NO: 183 - protein, 1554 aa, Artificial Sequence
  Description of Artificial Sequence: Synthetic polypeptide
MDKKYSIGLAIGTNSVGWAVITDEYKVPSKKFKVLGNTDRHSIKKNLIGALLFDSGETAEATRLKRTARRRYTRRKNRICYLQEIFSNEMAKVDDSFFHRLEESFLVEEDKKHERHPIFGNIVDEVAYHEKYPTIYHLRKKLVDSTDKADLRLIYLALAHMIKFRGHFLIEGDLNPDNSDVDKLFIQLVQTYNQLFEENPINASGVDAKAILSARLSKSRRLENLIAQLPGEKKNGLFGNLIALSLGLTPNFKSNFDLAEDAKLQLSKDTYDDDLDNLLAQIGDQYADLFLAAKNLSDAILLSDILRVNTEITKAPLSASMIKRYDEHHQDLTLLKALVRQQLPEKYKEIFFDQSKNGYAGYIDGGASQEEFYKFIKPILEKMDGTEELLVKLNREDLLRKQRTFDNGSIPHQIHLGELHAILRRQEDFYPFLKDNREKIEKILTFRIPYYVGPLARGNSRFAWMTRKSEETITPWNFEEVVDKGASAQSFIERMTNFDKNLPNEKVLPKHSLLYEYFTVYNELTKVKYVTEGMRKPAFLSGEQKKAIVDLLFKTNRKVTVKQLKEDYFKKIECFDSVEISGVEDRFNASLGTYHDLLKIIKDKDFLDNEENEDILEDIVLTLTLFEDREMIEERLKTYAHLFDDKVMKQLKRRRYTGWGRLSRKLINGIRDKQSGKTILDFLKSDGFANRNFMQLIHDDSLTFKEDIQKAQVSGQGDSLHEHIANLAGSPAIKKGILQTVKVVDELVKVMGRHKPENIVIEMARENQTTQKGQKNSRERMKRIEEGIKELGSQILKEHPVENTQLQNEKLYLYYLQNGRDMYVDQELDINRLSDYDVDHIVPQSFLKDDSIDNKVLTRSDKNRGKSDNVPSEEVVKKMKNYWRQLLNAKLITQRKFDNLTKAERGGLSELDKAGFIKRQLVETRQITKHVAQILDSRMNTKYDENDKLIREVKVITLKSKLVSDFRKDFQFYKVREINNYHHAHDAYLNAVVGTALIKKYPKLESEFVYGDYKVYDVRKMIAKSEQEIGKATAKYFFYSNIMNFFKTEITLANGEIRKRPLIETNGETGEIVWDKGRDFATVRKVLSMPQVNIVKKTEVQTGGFSKESILPKRNSDKLIARKKDWDPKKYGGFDSPTVAYSVLVVAKVEKGKSKKLKSVKELLGITIMERSSFEKNPIDFLEAKGYKEVKKDLIIKLPKYSLFELENGRKRMLASAGELQKGNELALPSKYVNFLYLASHYEKLKGTAHAEIMALRQGGLVMQNYRLIDATLYVTFEPCVMCAGAMIHSRIGRVVFGVRNAKTGAAGSLMDVLHYPGMNHRVEITEGILADECAALLCYFFRMPRQVFNAQKKAQSSTDGSSGSETPGTSESATPESSGSEVEFSHEYWMRHALTLAKRARDEREVPVGAVLVLNNRVIGEGWNRAIGLHDPSPEDNEQKQLFVEQHKHYLDEIIEQISEFSKRVILADANLDKVLSAYNKHRDKPIREQAENIIHLFTLTNLGAPAAFKYFDTTIDRKRYTSTKEVLDATLIHQSITGLYETRIDLSQLGGD

SEQ ID NO: 184 - protein, 208 aa, Petromyzon marinus
MTDAEYVRIHEKLDIYTFKKQFFNNKKSVSHRCYVLFELKRRGERRACFWGYAVNKPQSGTERGIHAEIFSIRKVEEYLRDNPGQFTINWYSSWSPCADCAEKILEWYNQELRGNGHTLKIWACKLYYEKNARNQIGLWNLRDNGVGLNVMVSEHYQCCRKIFIQSSHNQLNENRWLEKTLKRAEKRRSELSIMIQVKILHTTKSPAV

SEQ ID NO: 185 - DNA, 766 bp, Petromyzon marinus
tgacacgacacagccgtgtatatgaggaagggtagctggatggggggggggggaatacgttcagagaggacattagcgagcgtcttgttggtggccttgagtctagacacctgcagacatgaccgacgctgagtacgtgagaatccatgagaagttggacatctacacgtttaagaaacagtttttcaacaacaaaaaatccgtgtcgcatagatgctacgttctctttgaattaaaacgacggggtgaacgtagagcgtgtttttggggctatgctgtgaataaaccacagagcgggacagaacgtggaattcacgccgaaatctttagcattagaaaagtcgaagaatacctgcgcgacaaccccggacaattcacgataaattggtactcatcctggagtccttgtgcagattgcgctgaaaagatcttagaatggtataaccaggagctgcgggggaacggccacactttgaaaatctgggcttgcaaactctattacgagaaaaatgcgaggaatcaaattgggctgtggaacctcagagataacggggttgggttgaatgtaatggtaagtgaacactaccaatgttgcaggaaaatattcatccaatcgtcgcacaatcaattgaatgagaatagatggcttgagaagactttgaagcgagctgaaaaacgacggagcgagttgtccattatgattcaggtaaaaatactccacaccactaagagtcctgctgtttaagaggctatgcggatggttttc

SEQ ID NO: 186 - protein, 145 aa, Homo sapiens
MDSLLMNRRKFLYQFKNVRWAKGRRETYLCYVVKRRDSATSFSLDFGYLRNKNGCHVELLFLRYISDWDLDPGRCYRVTWFTSWSPCYDCARHVADFLRGNPNLSLRIFTARLYFCEDRKAEPEGLRRLHRAGVQIAIMTFKAPV

SEQ ID NO: 187 - DNA, 10681 bp, Homo sapiens
agagaaccatcattaattgaagtgagatttttctggcctgagacttgcagggaggcaagaagacactctggacaccactatggacaggtaaagaggcagtcttctcgtgggtgattgcactggccttcctctcagagcaaatctgagtaatgagactggtagctatccctttctctcatgtaactgtctgactgataagatcagcttgatcaatatgcatatatattttttgatctgtctccttttcttctattcagatcttatacgctgtcagcccaattctttctgtttcagacttctcttgatttccctctttttcatgtggcaaaagaagtagtgcgtacaatgtactgattcgtcctgagatttgtaccatggttgaaactaatttatggtaataatattaacatagcaaatctttagagactcaaatcatgaaaaggtaatagcagtactgtactaaaaacggtagtgctaattttcgtaataattttgtaaatattcaacagtaaaacaacttgaagacacactttcctagggaggcgttactgaaataatttagctatagtaagaaaatttgtaattttagaaatgccaagcattctaaattaattgcttgaaagtcactatgattgtgtccattataaggagacaaattcattcaagcaagttatttaatgttaaaggcccaattgttaggcagttaatggcacttttactattaactaatctttccatttgttcagacgtagcttaacttacctcttaggtgtgaatttggttaaggtcctcataatgtctttatgtgcagtttttgataggttattgtcatagaacttattctattcctacatttatgattactatggatgtatgagaataacacctaatccttatactttacctcaatttaactcctttataaagaacttacattacagaataaagattttttaaaaatatatttttttgtagagacagggtcttagcccagccgaggctggtctctaagtcctggcccaagcgatcctcctgcctgggcctcctaaagtgctggaattatagacatgagccatcacatccaatatacagaataaagatttttaatggaggatttaatgttcttcagaaaattttcttgaggtcagacaatgtcaaatgtctcctcagtttacactgagattttgaaaacaagtctgagctataggtccttgtgaagggtccattggaaatacttgttcaaagtaaaatggaaagcaaaggtaaaatcagcagttgaaattcagagaaagacagaaaaggagaaaagatgaaattcaacaggacagaagggaaatatattatcattaaggaggacagtatctgtagagctcattagtgatggcaaaatgacttggtcaggattatttttaacccgcttgtttctggtttgcacggctggggatgcagctagggttctgcctcagggagcacagctgtccagagcagctgtcagcctgcaagcctgaaacactccctcggtaaagtccttcctactcaggacagaaatgacgagaacagggagctggaaacaggcccctaaccagagaagggaagtaatggatcaacaaagttaactagcaggtcaggatcacgcaattcatttcactctgactggtaacatgtgacagaaacagtgtaggcttattgtattttcatgtagagtaggacccaaaaatccacccaaagtcctttatctatgccacatccttcttatctatacttccaggacactttttcttccttatgataaggctctctctctctccacacacacacacacacacacacacacacacacacacacacacacaaacacacaccccgccaaccaaggtgcatgtaaaaagatgtagattcctctgcctttctcatctacacagcccaggagggtaagttaatataagagggatttattggtaagagatgatgcttaatctgtttaacactgggcctcaaagagagaatttcttttcttctgtacttattaagcacctattatgtgttgagcttatatatacaaagggttattatatgctaatatagtaatagtaatggtggttggtactatggtaattaccataaaaattattatccttttaaaataaagctaattattattggatcttttttagtattcattttatgttttttatgtttttgattttttaaaagacaatctcaccctgttacccaggctggagtgcagtggtgcaatcatagctttctgcagtcttgaactcctgggctcaagcaatcctcctgccttggcctcccaaagtgttgggatacagtcatgagccactgcatctggcctaggatccatttagattaaaatatgcattttaaattttaaaataatatggctaatttttaccttatgtaatgtgtatactggcaataaatctagtttgctgcctaaagtttaaagtgctttccagtaagcttcatgtacgtgaggggagacatttaaagtgaaacagacagccaggtgtggtggctcacgcctgtaatcccagcactctgggaggctgaggtgggtggatcgcttgagccctggagttcaagaccagcctgagcaacatggcaaaacgctgtttctataacaaaaattagccgggcatggtggcatgtgcctgtggtcccagctactagggggctgaggcaggagaatcgttggagcccaggaggtcaaggctgcactgagcagtgcttgcgccactgcactccagcctgggtgacaggaccagaccttgcctcaaaaaaataagaagaaaaattaaaaataaatggaaacaactacaaagagctgttgtcctagatgagctacttagttaggctgatattttggtatttaacttttaaagtcagggtctgtcacctgcactacattattaaaatatcaattctcaatgtatatccacacaaagactggtacgtgaatgttcatagtacctttattcacaaaaccccaaagtagagactatccaaatatccatcaacaagtgaacaaataaacaaaatgtgctatatccatgcaatggaataccaccctgcagtacaaagaagctacttggggatgaatcccaaagtcatgacgctaaatgaaagagtcagacatgaaggaggagataatgtatgccatacgaaattctagaaaatgaaagtaacttatagttacagaaagcaaatcagggcaggcatagaggctcacacctgtaatcccagcactttgagaggccacgtgggaagattgctagaactcaggagttcaagaccagcctgggcaacacagtgaaactccattctccacaaaaatgggaaaaaaagaaagcaaatcagtggttgtcctgtggggaggggaaggactgcaaagagggaagaagctctggtggggtgagggtggtgattcaggttctgtatcctgactgtggtagcagtttggggtgtttacatccaaaaatattcgtagaattatgcatcttaaatgggtggagtttactgtatgtaaattatacctcaatgtaagaaaaaataatgtgtaagaaaactttcaattctcttgccagcaaacgttattcaaattcctgagccctttacttcgcaaattctctgcacttctgccccgtaccattaggtgacagcactagctccacaaattggataaatgcatttctggaaaagactagggacaaaatccaggcatcacttgtgctttcatatcaaccatgctgtacagcttgtgttgctgtctgcagctgcaatggggactcttgatttctttaaggaaacttgggttaccagagtatttccacaaatgctattcaaattagtgcttatgatatgcaagacactgtgctaggagccagaaaacaaagaggaggagaaatcagtcattatgtgggaacaacatagcaagatatttagatcattttgactagttaaaaaagcagcagagtacaaaatcacacatgcaatcagtataatccaaatcatgtaaatatgtgcctgtagaaagactagaggaataaacacaagaatcttaacagtcattgtcattagacactaagtctaattattattattagacactatgatatttgagatttaaaaaatctttaatattttaaaatttagagctcttctatttttccatagtattcaagtttgacaatgatcaagtattactctttctttttttttttttttttttttttttgagatggagttttggtcttgttgcccatgctggagtggaatggcatgaccatagctcactgcaacctccacctcctgggttcaagcaaagctgtcgcctcagcctcccgggtagatgggattacaggcgcccaccaccacactcggctaatgtttgtatttttagtagagatggggtttcaccatgttggccaggctggtctcaaactcctgacctcagaggatccacctgcctcagcctcccaaagtgctgggattacagatgtaggccactgcgcccggccaagtattgctcttatacattaaaaaacaggtgtgagccactgcgcccagccaggtattgctcttatacattaaaaaataggccggtgcagtggctcacgcctgtaatcccagcactttgggaagccaaggcgggcagaacacccgaggtcaggagtccaaggccagcctggccaagatggtgaaaccccgtctctattaaaaatacaaacattacctgggcatgatggtgggcgcctgtaatcccagctactcaggaggctgaggcaggaggatccgcggagcctggcagatctgcctgagcctgggaggttgaggctacagtaagccaagatcatgccagtatacttcagcctgggcgacaaagtgagaccgtaacaaaaaaaaaaaaatttaaaaaaagaaatttagatcaagatccaactgtaaaaagtggcctaaacaccacattaaagagtttggagtttattctgcaggcagaagagaaccatcagggggtcttcagcatgggaatggcatggtgcacctggtttttgtgagatcatggtggtgacagtgtggggaatgttattttggagggactggaggcagacagaccggttaaaaggccagcacaacagataaggaggaagaagatgagggcttggaccgaagcagagaagagcaaacagggaaggtacaaattcaagaaatattggggggtttgaatcaacacatttagatgattaattaaatatgaggactgaggaataagaaatgagtcaaggatggttccaggctgctaggctgcttacctgaggtggcaaagtcgggaggagtggcagtttaggacagggggcagttgaggaatattgttttgatcattttgagtttgaggtacaagttggacacttaggtaaagactggaggggaaatctgaatatacaattatgggactgaggaacaagtttattttattttttgtttcgttttcttgttgaagaacaaatttaattgtaatcccaagtcatcagcatctagaagacagtggcaggaggtgactgtcttgtgggtaagggtttggggtccttgatgagtatctctcaattggccttaaatataagcaggaaaaggagtttatgatggattccaggctcagcagggctcaggagggctcaggcagccagcagaggaagtcagagcatcttctttggtttagcccaagtaatgacttccttaaaaagctgaaggaaaatccagagtgaccagattataaactgtactcttgcattttctctccctcctctcacccacagcctcttgatgaaccggaggaagtttctttaccaattcaaaaatgtccgctgggctaagggtcggcgtgagacctacctgtgctacgtagtgaagaggcgtgacagtgctacatccttttcactggactttggttatcttcgcaataaggtatcaattaaagtcggctttgcaagcagtttaatggtcaactgtgagtgcttttagagccacctgctgatggtattacttccatccttttttggcatttgtgtctctatcacattcctcaaatccttttttttatttctttttccatgtccatgcacccatattagacatggcccaaaatatgtgatttaattcctccccagtaatgctgggcaccctaataccactccttccttcagtgccaagaacaactgctcccaaactgtttaccagctttcctcagcatctgaattgcctttgagattaattaagctaaaagcatttttatatgggagaatattatcagcttgtccaagcaaaaattttaaatgtgaaaaacaaattgtgtcttaagcatttttgaaaattaaggaagaagaatttgggaaaaaattaacggtggctcaattctgtcttccaaatgatttcttttccctcctactcacatgggtcgtaggccagtgaatacattcaacatggtgatccccagaaaactcagagaagcctcggctgatgattaattaaattgatctttcggctacccgagagaattacatttccaagagacttcttcaccaaaatccagatgggtttacataaacttctgcccacgggtatctcctctctcctaacacgctgtgacgtctgggcttggtggaatctcagggaagcatccgtggggtggaaggtcatcgtctggctcgttgtttgatggttatattaccatgcaattttctttgcctacatttgtattgaatacatcccaatctccttcctattcggtgacatgacacattctatttcagaaggctttgattttatcaagcactttcatttacttctcatggcagtgcctattacttctcttacaatacccatctgtctgctttaccaaaatctatttccccttttcagatcctcccaaatggtcctcataaactgtcctgcctccacctagtggtccaggtatatttccacaatgttacatcaacaggcacttctagccattttccttctcaaaaggtgcaaaaagcaacttcataaacacaaattaaatcttcggtgaggtagtgtgatgctgcttcctcccaactcagcgcacttcgtcttcctcattccacaaaaacccatagccttccttcactctgcaggactagtgctgccaagggttcagctctacctactggtgtgctcttttgagcaagttgcttagcctctctgtaacacaaggacaatagctgcaagcatccccaaagatcattgcaggagacaatgactaaggctaccagagccgcaataaaagtcagtgaattttagcgtggtcctctctgtctctccagaacggctgccacgtggaattgctcttcctccgctacatctcggactgggacctagaccctggccgctgctaccgcgtcacctggttcacctcctggagcccctgctacgactgtgcccgacatgtggccgactttctgcgagggaaccccaacctcagtctgaggatcttcaccgcgcgcctctacttctgtgaggaccgcaaggctgagcccgaggggctgcggcggctgcaccgcgccggggtgcaaatagccatcatgaccttcaaaggtgcgaaagggccttccgcgcaggcgcagtgcagcagcccgcattcgggattgcgatgcggaatgaatgagttagtggggaagctcgaggggaagaagtgggcggggattctggttcacctctggagccgaaattaaagattagaagcagagaaaagagtgaatggctcagagacaaggccccgaggaaatgagaaaatggggccagggttgcttctttcccctcgatttggaacctgaactgtcttctacccccatatccccgcctttttttcctttttttttttttgaagattatttttactgctggaatacttttgtagaaaaccacgaaagaactttcaaagcctgggaagggctgcatgaaaattcagttcgtctctccagacagcttcggcgcatccttttggtaaggggcttcctcgctttttaaattttctttctttctctacagtcttttttggagtttcgtatatttcttatattttcttattgttcaatcactctcagttttcatctgatgaaaactttatttctcctccacatcagctttttcttctgctgtttcaccattcagagccctctgctaaggttccttttccctcccttttctttcttttgttgtttcacatctttaaatttctgtctctccccagggttgcgtttccttcctggtcagaattcttttctcctttttttttttttttttttttttttttaaacaaacaaacaaaaaacccaaaaaaactctttcccaatttactttcttccaacatgttacaaagccatccactcagtttagaagactctccggccccaccgacccccaacctcgttttgaagccattcactcaatttgcttctctctttctctacagcccctgtatgaggttgatgacttacgagacgcatttcgtactttgggactttgatagcaacttccaggaatgtcacacacgatgaaatatctctgctgaagacagtggataaaaaacagtccttcaagtcttctctgtttttattcttcaactctcactttcttagagtttacagaaaaaatatttatatacgactctttaaaaagatctatgtcttgaaaatagagaaggaacacaggtctggccagggacgtgctgcaattggtgcagttttgaatgcaacattgtcccctactgggaataacagaactgcaggacctgggagcatcctaaagtgtcaacgtttttctatgacttttaggtaggatgagagcagaaggtagatcctaaaaagcatggtgagaggatcaaatgtttttatatcaacatcctttattatttgattcatttgagttaacagtggtgttagtgatagatttttctattcttttcccttgacgtttactttcaagtaacacaaactcttccatcaggccatgatctataggacctcctaatgagagtatctgggtgattgtgaccccaaaccatctctccaaagcattaatatccaatcatgcgctgtatgttttaatcagcagaagcatgtttttatgtttgtacaaaagaagattgttatgggtggggatggaggtatagaccatgcatggtcaccttcaagctactttaataaaggatcttaaaatgggcaggaggactgtgaacaagacaccctaataatgggttgatgtctgaagtagcaaatcttctggaaacgcaaactcttttaaggaagtccctaatttagaaacacccacaaacttcacatatcataattagcaaacaattggaaggaagttgcttgaatgttggggagaggaaaatctattggctctcgtgggtctcttcatctcagaaatgccaatcaggtcaaggtttgctacattttgtatgtgtgtgatgcttctcccaaaggtatattaactatataagagagttgtgacaaaacagaatgataaagctgcgaaccgtggcacacgctcatagttctagctgcttgggaggttgaggagggaggatggcttgaacacaggtgttcaaggccagcctgggcaacataacaagatcctgtctctcaaaaaaaaaaaaaaaaaaaagaaagagagagggccgggcgtggtggctcacgcctgtaatcccagcactttgggaggccgagccgggcggatcacctgtggtcaggagtttgagaccagcctggccaacatggcaaaaccccgtctgtactcaaaatgcaaaaattagccaggcgtggtagcaggcacctgtaatcccagctacttgggaggctgaggcaggagaatcgcttgaacccaggaggtggaggttgcagtaagctgagatcgtgccgttgcactccagcctgggcgacaagagcaagactctgtctcagaaaaaaaaaaaaaaaagagagagagagagaaagagaacaatatttgggagagaaggatggggaagcattgcaaggaaattgtgctttatccaacaaaatgtaaggagccaataagggatccctatttgtctcttttggtgtctatttgtccctaacaactgtctttgacagtgagaaaaatattcagaataaccatatccctgtgccgttattacctagcaacccttgcaatgaagatgagcagatccacaggaaaacttgaatgcacaactgtcttattttaatcttattgtacataagtttgtaaaagagttaaaaattgttacttcatgtattcatttatattttatattattttgcgtctaatgattttttattaacatgatttccttttctgatatattgaaatggagtctcaaagcttcataaatttataactttagaaatgattctaataacaacgtatgtaattgtaacattgcagtaatggtgctacgaagccatttctcttgatttttagtaaacttttatgacagcaaatttgcttctggctcactttcaatcagttaaataaatgataaataattttggaagctgtgaagataaaataccaaataaaataatataaaagtgatttatatgaagttaaaataaaaaatcagtatgatggaataaacttg

SEQ ID NO: 188 - protein, 229 aa, Rattus norvegicus [sequence omitted]

SEQ ID NO: 189 - protein, 229 aa, Mus musculus
MSSETGPVAVDPTLRRRIEPHEFEVFFDPRELRKETCLLYEINWGGRHSVWRHTSQNTSNHVEVNFLEKFTTERYFRPNTRCSITWFLSWSPCGECSRAITEFLSRHPYVTLFIYIARLYHHTDQRNRQGLRDLISSGVTIQIMTEQEYCYCWRNFVNYPPSNEAYWPRYPHLWVKLYVLELYCIILGLPPCLKILRRKQPQLTFFTITLQTCHYQRIPPHLLWATGLK

SEQ ID NO: 190 - protein, 229 aa, Mesocricetus auratus
MSSETGPVVVDPTLRRRIEPHEFDAFFDQGELRKETCLLYEIRWGGRHNIWRHTGQNTSRHVEINFIEKFTSERYFYPSTRCSIVWFLSWSPCGECSKAITEFLSGHPNVTLFIYAARLYHHTDQRNRQGLRDLISRGVTIRIMTEQEYCYCWRNFVNYPPSNEVYWPRYPNLWMRLYALELYCIHLGLPPCLKIKRRHQYPLTFFRLNLQSCHYQRIPPHILWATGFI

SEQ ID NO: 191 - protein, 236 aa, Homo sapiens
MTSEKGPSTGDPTLRRRIEPWEFDVFYDPRELRKEACLLYEIKWGMSRKIWRSSGKNTTNHVEVNFIKKFTSERDFHPSMSCSITWFLSWSPCWECSQAIREFLSRHPGVTLVIYVARLFWHMDQQNRQGLRDLVNSGVTIQIMRASEYYHCWRNFVNYPPGDEAHWPQYPPLWMMLYALELHCIILSLPPCLKISRRWQNHLTFFRLHLQNCHYQTIPPHILLATGLIHPSVAWR

SEQ ID NO: 192 - protein, 236 aa, Pongo pygmaeus
MTSEKGPSTGDPTLRRRIESWEFDVFYDPRELRKETCLLYEIKWGMSRKIWRSSGKNTTNHVEVNFIKKFTSERRFHSSISCSITWFLSWSPCWECSQAIREFLSQHPGVTLVIYVARLFWHMDQRNRQGLRDLVNSGVTIQIMRASEYYHCWRNFVNYPPGDEAHWPQYPPLWMMLYALELHCIILSLPPCLKISRRWQNHLAFFRLHLQNCHYQTIPPHILLATGLIHPSVTWR

SEQ ID NO: 193 - protein, 236 aa, Oryctolagus cuniculus
MASEKGPSNKDYTLRRRIEPWEFEVFFDPQELRKEACLLYEIKWGASSKTWRSSGKNTTNHVEVNFLEKLTSEGRLGPSTCCSITWFLSWSPCWECSMAIREFLSQHPGVTLIIFVARLFQHMDRRNRQGLKDLVTSGVTVRVMSVSEYCYCWENFVNYPPGKAAQWPRYPPRWMLMYALELYCIILGLPPCLKISRRHQKQLTFFSLTPQYCHYKMIPPYILLATGLLQPSVPWR

SEQ ID NO: 194 - protein, 235 aa, Monodelphis domestica
MNSKTGPSVGDATLRRRIKPWEFVAFFNPQELRKETCLLYEIKWGNQNIWRHSNQNTSQHAEINFMEKFTAERHFNSSVRCSITWFLSWSPCWECSKAIRKFLDHYPNVTLAIFISRLYWHMDQQHRQGLKELVHSGVTIQIMSYSEYHYCWRNFVDYPQGEEDYWPKYPYLWIMLYVLELHCIILGLPPCLKISGSHSNQLALFSLDLQDCHYQKIPYNVLVATGLVQPFVTWR

SEQ ID NO: 195 - protein, 224 aa, Mus musculus
MAQKEEAAEAAAPASQNGDDLENLEDPEKLKELIDLPPFEIVTGVRLPVNFFKFQFRNVEYSSGRNKTFLCYVVEVQSKGGQAQATQGYLEDEHAGAHAEEAFFNTILPAFDPALKYNVTWYVSSSPCAACADRILKTLSKTKNLRLLILVSRLFMWEEPEVQAALKKLKEAGCKLRIMKPQDFEYIWQNFVEQEEGESKAFEPWEDIQENFLYYEEKLADILK

SEQ ID NO: 196 - protein, 224 aa, Homo sapiens
MAQKEEAAVATEAASQNGEDLENLDDPEKLKELIELPPFEIVTGERLPANFFKFQFRNVEYSSGRNKTFLCYVVEAQGKGGQVQASRGYLEDEHAAAHAEEAFFNTILPAFDPALRYNVTWYVSSSPCAACADRIIKTLSKTKNLRLLILVGRLFMWEEPEIQAALKKLKEAGCKLRIMKPQDFEYVWQNFVEQEEGESKAFQPWEDIQENFLYYEEKLADILK

SEQ ID NO: 197 - protein, 224 aa, Pongo pygmaeus
MAQKEEAAAATEAASQNGEDLENLDDPEKLKELIELPPFEIVTGERLPANFFKFQFRNVEYSSGRNKTFLCYVVEAQGKGGQVQASRGYLEDEHAAAHAEEAFFNTILPAFDPALRYNVTWYVSSSPCAACADRIIKTLSKTKNLRLLILVGRLFMWEELEIQDALKKLKEAGCKLRIMKPQDFEYVWQNFVEQEEGESKAFQPWEDIQENFLYYEEKLADILK

SEQ ID NO: 198 - protein, 224 aa, Bos taurus
MAQKEEAAAAAEPASQNGEEVENLEDPEKLKELIELPPFEIVTGERLPAHYFKFQFRNVEYSSGRNKTFLCYVVEAQSKGGQVQASRGYLEDEHATNHAEEAFFNSIMPTFDPALRYMVTWYVSSSPCAACADRIVKTLNKTKNLRLLILVGRLFMWEEPEIQAALRKLKEAGCRLRIMKPQDFEYIWQNFVEQEEGESKAFEPWEDIQENFLYYEEKLADILK

SEQ ID NO: 199 - protein, 440 aa, Mus musculus
MQPQRLGPRAGMGPFCLGCSHRKCYSPIRNLISQETFKFHFKNLGYAKGRKDTFLCYEVTRKDCDSPVSLHHGVFKNKDNIHAEICFLYWFHDKVLKVLSPREEFKITWYMSWSPCFECAEQIVRFLATHHNLSLDIFSSRLYNVQDPETQQNLCRLVQEGAQVAAMDLYEFKKCWKKFVDNGGRRFRPWKRLLTNFRYQDSKLQEILRPCYISVPSSSSSTLSNICLTKGLPETRFWVEGRRMDPLSEEEFYSQFYNQRVKHLCYYHRMKPYLCYQLEQFNGQAPLKGCLLSEKGKQHAEILFLDKIRSMELSQVTITCYLTWSPCPNCAWQLAAFKRDRPDLILHIYTSRLYFHWKRPFQKGLCSLWQSGILVDVMDLPQFTDCWTNFVNPKRPFWPWKGLEIISRRTQRRLRRIKESWGLQDLVNDFGNLQLGPPMS

SEQ ID NO: 200 - protein, 199 aa, Homo sapiens
MEASPASGPRHLMDPHIFTSNFNNGIGRHKTYLCYEVERLDNGTSVKMDQHRGFLHNQAKNLLCGFYGRHAELRFLDLVPSLQLDPAQIYRVTWFISWSPCFSWGCAGEVRAFLQENTHVRLRIFAARIYDYDPLYKEALQMLRDAGAQVSIMTYDEFKHCWDTFVDHQGCPFQPWDGLDEHSQALSGRLRAILQNQGN

SEQ ID NO: 201 - protein, 382 aa, Homo sapiens
MNPQIRNPMERMYRDTFYDNFENEPILYGRSYTWLCYEVKIKRGRSNLLWDTGVFRGQVYFKPQYHAEMCFLSWFCGNQLPAYKCFQITWFVSWTPCPDCVAKLAEFLSEHPNVTLTISAARLYYYWERDYRRALCRLSQAGARVTIMDYEEFAYCWENFVYNEGQQFMPWYKFDENYAFLHRTLKEILRYLMDPDTFTFNFNNDPLVLRRRQTYLCYEVERLDNGTWVLMDQHMGFLCNEAKNLLCGFYGRHAELRFLDLVPSLQLDPAQIYRVTWFISWSPCFSWGCAGEVRAFLQENTHVRLRIFAARIYDYDPLYKEALQMLRDAGAQVSIMTYDEFEYCWDTFVYRQGCPFQPWDGLEEHSQALSGRLRAILQNQGN

SEQ ID NO: 202 - protein, 190 aa, Homo sapiens
MNPQIRNPMKAMYPGTFYFQFKNLWEANDRNETWLCFTVEGIKRRSVVSWKTGVFRNQVDSETHCHAERCFLSWFCDDILSPNTKYQVTWYTSWSPCPDCAGEVAEFLARHSNVNLTIFTARLYYFQYPCYQEGLRSLSQEGVAVEIMDYEDFKYCWENFVYNDNEPFKPWKGLKTNFRLLKRRLRESLQ

SEQ ID NO: 203 - protein, 386 aa, Homo sapiens
MNPQIRNPMERMYRDTFYDNFENEPILYGRSYTWLCYEVKIKRGRSNLLWDTGVFRGPVLPKRQSNHRQEVYFRFENHAEMCFLSWFCGNRLPANRRFQITWFVSWNPCLPCVVKVTKFLAEHPNVTLTISAARLYYYRDRDWRWVLLRLHKAGARVKIMDYEDFAYCWENFVCNEGQPFMPWYKFDDNYASLHRTLKEILRNPMEAMYPHIFYFHFKNLLKACGRNESWLCFTMEVTKHHSAVFRKRGVFRNQVDPETHCHAERCFLSWFCDDILSPNTNYEVTWYTSWSPCPECAGEVAEFLARHSNVNLTIFTARLCYFWDTDYQEGLCSLSQEGASVKIMGYKDFVSCWKNFVYSDDEPFKPWKGLQTNFRLLKRRLREILQ

SEQ ID NO: 204 - protein, 373 aa, Homo sapiens
MKPHFRNTVERMYRDTFSYNFYNRPILSRRNTVWLCYEVKTKGPSRPRLDAKIFRGQVYSQPEHHAEMCFLSWFCGNQLPAYKCFQITWFVSWTPCPDCVAKLAEFLAEHPNVTLTISAARLYYYWERDYRRALCRLSQAGARVKIMDDEEFAYCWENFVYSEGQPFMPWYKFDDNYAFLHRTLKEILRNPMEAMYPHIFYFHFKNLRKAYGRNESWLCFTMEVVKHHSPVSWKRGVFRNQVDPETHCHAERCFLSWFCDDILSPNTNYEVTWYTSWSPCPECAGEVAEFLARHSNVNLTIFTARLYYFWDTDYQEGLRSLSQEGASVEIMGYKDFKYCWENFVYNDDEPFKPWKGLKYNFLFLDSKLQEILE

SEQ ID NO: 205 - protein, 384 aa, Homo sapiens
MKPHFRNTVERMYRDTFSYNFYNRPILSRRNTVWLCYEVKTKGPSRPPLDAKIFRGQVYSELKYHPEMRFFHWFSKWRKLHRDQEYEVTWYISWSPCTKCTRDMATFLAEDPKVTLTIFVARLYYFWDPDYQEALRSLCQKRDGPRATMKIMNYDEFQHCWSKFVYSQRELFEPWNNLPKYYILLHIMLGEILRHSMDPPTFTFNFNNEPWVRGRHETYLCYEVERMHNDTWVLLNQRRGFLCNQAPHKHGFLEGRHAELCFLDVIPFWKLDLDQDYRVTCFTSWSPCFSCAQEMAKFISKNKHVSLCIFTARIYDDQGRCQEGLRTLAEAGAKISIMTYSEFKHCWDTFVDHQGCPFQPWDGLDEHSQDLSGRLRAILQNQEN

SEQ ID NO: 206 - protein, 367 aa, Homo sapiens
MEPIYEEYLANHGTIVKPYYWLSFSLDCSNCPYHIRTGEEARVSLTEFCQIFGFPYGTTFPQTKHLTFYELKTSSGSLVQKGHASSCTGNYIHPESMLFEMNGYLDSAIYNNDSIRHIILYSNNSPCNEANHCCISKMYNFLITYPGITLSIYFSQLYHTEMDFPASAWNREALRSLASLWPRVVLSPISGGIWHSVLHSFISGVSGSHVFQPILTGRALADRHNAYEINAITGVKPYFTDVLLQTKRNPNTKAQEALESYPLNNAFPGQFFQMPSGQLQPNLPPDLRAPVVFVLVPLRDLPPMHMGQNPNKPRNIVRHLNMPQMSFQETKDLGRLPTGRSVEIVEITEQFASSKEADEKKKKKGKK

SEQ ID NO: 207 - protein, 198 aa, Mus musculus
MDSLLMKQKKFLYHFKNVRWAKGRHETYLCYVVKRRDSATSCSLDFGHLRNKSGCHVELLFLRYISDWDLDPGRCYRVTWFTSWSPCYDCARHVAEFLRWNPNLSLRIFTARLYFCEDRKAEPEGLRRLHRAGVQIGIMTFKDYFYCWNTFVENRERTFKAWEGLHENSVRLTRQLRRILLPLYEVDDLRDAFRMLGF

SEQ ID NO: 208 - protein, 388 aa, Rattus norvegicus
MEPLYEEYLTHSGTIVKPYYWLSVSLNCTNCPYHIRTGEEARVPYTEFHQTFGFPWSTYPQTKHLTFYELRSSSGNLIQKGLASNCTGSHTHPESMLFERDGYLDSLIFHDSNIRHIILYSNNSPCDEANHCCISKMYNFLMNYPEVTLSVFFSQLYHTENQFPTSAWNREALRGLASLWPQVTLSAISGGIWQSILETFVSGISEGLTAVRPFTAGRTLTDRYNAYEINCITEVKPYFTDALHSWQKENQDQKVWAASENQPLHNTTPAQWQPDMSQDCRTPAVFMLVPYRDLPPIHVNPSPQKPRTVVRHLNTLQLSASKVKALRKSPSGRPVKKEEARKGSTRSQEANETNKSKWKKQTLFIKSNICHLLEREQKKIGILSSWSV

SEQ ID NO: 209 - protein, 363 aa, Macaca fascicularis
MEPTYEEYLANHGTIVKPYYWLSFSLDCSNCPYHIRTGEEARVSLTEFCQIFGFPYGTTYPQTKHLTFYELKTSSGSLVQKGHASSCTGNYIHPESMLFEMNGYLDSAIYNNDSIRHIILYCNNSPCNEANHCCISKVYNFLITYPGITLSIYFSQLYHTEMDFPASAWNREALRSLASLWPRVVLSPISGGIWHSVLHSFVSGVSGSHVFQPILTGRALTDRYNAYEINAITGVKPFFTDVLLHTKRNPNTKAQMALESYPLNNAFPGQSFQMTSGIPPDLRAPVVFVLLPLRDLPPMHMGQDPNKPRNIIRHLNMPQMSFQETKDLERLPTRRSVETVEITERFASSKQAEEKTKKKKGKK

SEQ ID NO: 210 - protein, 198 aa, Homo sapiens [sequence omitted]

SEQ ID NO: 211 - protein, 198 aa, Canis lupus
MDSLLMKQRKFLYHFKNVRWAKGRHETYLCYVVKRRDSATSFSLDFGHLRNKSGCHVELLFLRYISDWDLDPGRCYRVTWFTSWSPCYDCARHVADFLRGYPNLSLRIFAARLYFCEDRKAEPEGLRRLHRAGVQIAIMTFKDYFYCWNTFVENREKTFKAWEGLHENSVRLSRQLRRILLPLYEVDDLRDAFRTLGL

SEQ ID NO: 212 - protein, 199 aa, Bos taurus
MDSLLKKQRQFLYQFKNVRWAKGRHETYLCYVVKRRDSPTSFSLDFGHLRNKAGCHVELLFLRYISDWDLDPGRCYRVTWFTSWSPCYDCARHVADFLRGYPNLSLRIFTARLYFCDKERKAEPEGLRRLHRAGVQIAIMTFKDYFYCWNTFVENHERTFKAWEGLHENSVRLSRQLRRILLPLYEVDDLRDAFRTLGL

SEQ ID NO: 213 - protein, 198 aa, Mus musculus [sequence omitted]

SEQ ID NO: 214 - protein, 224 aa, Petromyzon marinus
MAGYECVRVSEKLDFDTFEFQFENLHYATERHRTYVIFDVKPQSAGGRSRRLWGYIINNPNVCHAELILMSMIDRHLESNPGVYAMTWYMSWSPCANCSSKLNPWLKNLLEEQGHTLTMHFSRIYDRDREGDHRGLRGLKHVSNSFRMGVVGRAEVKECLAEYVEASRRTLTWLDTTESMAAKMRRKLFCILVRCAGMRESGIPLHLFTLQTPLLSGRVVWWRV

SEQ ID NO: 215 - protein, 331 aa, Petromyzon marinus
MELREVVDCALASCVRHEPLSRVAFLRCFAAPSQKPRGTVILFYVEGAGRGVTGGHAVNYNKQGTSIHAEVLLLSAVRAALLRRRRCEDGEEATRGCTLHCYSTYSPCRDCVEYIQEFGASTGVRVVIHCCRLYELDVNRRRSEAEGVLRSLSRLGRDFRLMGPRDAIALLLGGRLANTADGESGASGNAWVTETNVVEPLVDMTGFGDEDLHAQVQRNKQIREAYANYASAVSLMLGELHVDPDKFPFLAEFLAQTSVEPSGTPRETRGRPRGASSRGPEIGRQRPADFERALGAYGLFLHPRIVSREADREEIKRDLIVVMRKHNYQGP

SEQ ID NO: 216 - protein, 209 aa, Petromyzon marinus
MAGDENVRVSEKLDFDTFEFQFENLHYATERHRTYVIFDVKPQSAGGRSRRLWGYIINNPNVCHAELILMSMIDRHLESNPGVYAMTWYMSWSPCANCSSKLNPWLKNLLEEQGHTLMMHFSRIYDRDREGDHRGLRGLKHVSNSFRMGVVGRAEVKECLAEYVEASRRTLTWLDTTESMAAKMRRKLFCILVRCAGMRESGMPLHLFT

SEQ ID NO: 217 - protein, 158 aa, Saccharomyces cerevisiae
MVTGGMASKWDQKGMDIAYEEAALGYKEGGVPIGGCLINNKDGSVLGRGHNMRFQKGSATLHGEISTLENCGRLEGKVYKDTTLYTTLSPCDMCTGAIIMYGIPRCVVGENVNFKSKGEKYLQTRGHEVVVVDDERCKKIMKQFIDERPQDWFEDIGE

SEQ ID NO: 218 - protein, 218 aa, Artificial Sequence
  Description of Artificial Sequence: Synthetic polypeptide
MSSETGPVAVDPTLRRRIEPHEFEVFFDPRELRKETCLLYEINWGGRHSIWRHTSQNTNKHVEVNFIEKFTTERYFCPNTRCSITWFLSWSPCGECSRAITEFLSRYPHVTLFIYIARLYHHADPRNRQGLRDLISSGVTIQIMTEQESGYCWRNFVNYSPSNEAHWPRYPHLWVRGLPPCLNILRRKQPQLTFFTIALQSCHYQRLPPHILWATGLK

SEQ ID NO: 219 - protein, 218 aa, Artificial Sequence
  Description of Artificial Sequence: Synthetic polypeptide
MSSETGPVAVDPTLRRRIEPHEFEVFFDPRELRKETCLLYEINWGGRHSIWRHTSQNTNKHVEVNFIEKFTTERYFCPNTRCSITWFLSWSPCGECSRAITEFLSRYPHVTLFIYIARLYHHADPRNRQGLRDLISSGVTIQIMTEQESGYCWRNFVNYSPSNEAHWPRYPHLWVRLYVLELYCIILGLPPCLNILRRKQPQHYQRLPPHILWATGLK

SEQ ID NO: 220 - protein, 239 aa, Rattus norvegicus
MAVGSKPKAALVGPHWERERIWCFLCSTGLGTQQTGQTSRWLRPAATQDPVSPPRSLLMKQRKFLYHFKNVRWAKGRHETYLCYVVKRRDSATSFSLDFGYLRNKSGCHVELLFLRYISDWDLDPGRCYRVTWFTSWSPCYDCARHVADFLRGNPNLSLRIFTARLTGWGALPAGLMSPARPSDYFYCWNTFVENHERTFKAWEGLHENSVRLSRRLRRILLPLYEVDDLRDAFRTLGL

SEQ ID NO: 221 - protein, 429 aa, Mus musculus
MGPFCLGCSHRKCYSPIRNLISQETFKFHFKNLGYAKGRKDTFLCYEVTRKDCDSPVSLHHGVFKNKDNIHAEICFLYWFHDKVLKVLSPREEFKITWYMSWSPCFECAEQIVRFLATHHNLSLDIFSSRLYNVQDPETQQNLCRLVQEGAQVAAMDLYEFKKCWKKFVDNGGRRFRPWKRLLTNFRYQDSKLQEILRPCYIPVPSSSSSTLSNICLTKGLPETRFCVEGRRMDPLSEEEFYSQFYNQRVKHLCYYHRMKPYLCYQLEQFNGQAPLKGCLLSEKGKQHAEILFLDKIRSMELSQVTITCYLTWSPCPNCAWQLAAFKRDRPDLILHIYTSRLYFHWKRPFQKGLCSLWQSGILVDVMDLPQFTDCWTNFVNPKRPFWPWKGLEIISRRTQRRLRRIKESWGLQDLVNDFGNLQLGPPMS

SEQ ID NO: 222 - protein, 430 aa, Rattus norvegicus
MGPFCLGCSHRKCYSPIRNLISQETFKFHFKNRLRYAIDRKDTFLCYEVTRKDCDSPVSLHHGVFKNKDNIHAEICFLYWFHDKVLKVLSPREEFKITWYMSWSPCFECAEQVLRFLATHHNLSLDIFSSRLYNIRDPENQQNLCRLVQEGAQVAAMDLYEFKKCWKKFVDNGGRRFRPWKKLLTNFRYQDSKLQEILRPCYIPVPSSSSSTLSNICLTKGLPETRFCVERRRVHLLSEEEFYSQFYNQRVKHLCYYHGVKPYLCYQLEQFNGQAPLKGCLLSEKGKQHAEILFLDKIRSMELSQVIITCYLTWSPCPNCAWQLAAFKRDRPDLILHIYTSRLYFHWKRPFQKGLCSLWQSGILVDVMDLPQFTDCWTNFVNPKRPFWPWKGLEIISRRTQRRLHRIKESWGLQDLVNDFGNLQLGPPMS

SEQ ID NO: 223 - protein, 370 aa, Macaca mulatta
MVEPMDPRTFVSNFNNRPILSGLNTVWLCCEVKTKDPSGPPLDAKIFQGKVYSKAKYHPEMRFLRWFHKWRQLHHDQEYKVTWYVSWSPCTRCANSVATFLAKDPKVTLTIFVARLYYFWKPDYQQALRILCQKRGGPHATMKIMNYNEFQDCWNKFVDGRGKPFKPRNNLPKHYTLLQATLGELLRHLMDPGTFTSNFNNKPWVSGQHETYLCYKVERLHNDTWVPLNQHRGFLRNQAPNIHGFPKGRHAELCFLDLIPFWKLDGQQYRVTCFTSWSPCFSCAQEMAKFISNNEHVSLCIFAARIYDDQGRYQEGLRALHRDGAKIAMMNYSEFEYCWDTFVDRQGRPFQPWDGLDEHSQALSGRLRAI

SEQ ID NO: 224 - protein, 384 aa, Pan troglodytes
MKPHFRNPVERMYQDTFSDNFYNRPILSHRNTVWLCYEVKTKGPSRPPLDAKIFRGQVYSKLKYHPEMRFFHWFSKWRKLHRDQEYEVTWYISWSPCTKCTRDVATFLAEDPKVTLTIFVARLYYFWDPDYQEALRSLCQKRDGPRATMKIMNYDEFQHCWSKFVYSQRELFEPWNNLPKYYILLHIMLGEILRHSMDPPTFTSNFNNELWVRGRHETYLCYEVERLHNDTWVLLNQRRGFLCNQAPHKHGFLEGRHAELCFLDVIPFWKLDLHQDYRVTCFTSWSPCFSCAQEMAKFISNNKHVSLCIFAARIYDDQGRCQEGLRTLAKAGAKISIMTYSEFKHCWDTFVDHQGCPFQPWDGLEEHSQALSGRLRAILQNQGN

SEQ ID NO: 225 - protein, 377 aa, Chlorocebus sabaeus
MNPQIRNMVEQMEPDIFVYYFNNRPILSGRNTVWLCYEVKTKDPSGPPLDANIFQGKLYPEAKDHPEMKFLHWFRKWRQLHRDQEYEVTWYVSWSPCTRCANSVATFLAEDPKVTLTIFVARLYYFWKPDYQQALRILCQERGGPHATMKIMNYNEFQHCWNEFVDGQGKPFKPRKNLPKHYTLLHATLGELLRHVMDPGTFTSNFNNKPWVSGQRETYLCYKVERSHNDTWVLLNQHRGFLRNQAPDRHGFPKGRHAELCFLDLIPFWKLDDQQYRVTCFTSWSPCFSCAQKMAKFISNNKHVSLCIFAARIYDDQGRCQEGLRTLHRDGAKIAVMNYSEFEYCWDTFVDRQGRPFQPWDGLDEHSQALSGRLRAI

SEQ ID NO: 226 - protein, 395 aa, Rattus norvegicus
MQPQGLGPNAGMGPVCLGCSHRRPYSPIRNPLKKLYQQTFYFHFKNVRYAWGRKNNFLCYEVNGMDCALPVPLRQGVFRKQGHIHAELCFIYWFHDKVLRVLSPMEEFKVTWYMSWSPCSKCAEQVARFLAAHRNLSLAIFSSRLYYYLRNPNYQQKLCRLIQEGVHVAAMDLPEFKKCWNKFVDNDGQPFRPWMRLRINFSFYDCKLQEIFSRMNLLREDVFYLQFNNSHRVKPVQNRYYRRKSYLCYQLERANGQEPLKGYLLYKKGEQHVEILFLEKMRSMELSQVRITCYLTWSPCPNCARQLAAFKKDHPDLILRIYTSRLYFWRKKFQKGLCTLWRSGIHVDVMDLPQFADCWTNFVNPQRPFRPWNELEKNSWRIQRRLRRIKESWGL

SEQ ID NO: 227 - protein, 226 aa, Bos taurus
DGWEVAFRSGTVLKAGVLGVSMTEGWAGSGHPGQGACVWTPGTRNTMNLLREVLFKQQFGNQPRVPAPYYRRKTYLCYQLKQRNDLTLDRGCFRNKKQRHAERFIDKINSLDLNPSQSYKIICYITWSPCPNCANELVNFITRNNHLKLEIFASRLYFHWIKSFKMGLQDLQNAGISVAVMTHTEFEDCWEQFVDNQSRPFQPWDKLEQYSASIRRRLQRILTAPI

SEQ ID NO: 228 - protein, 490 aa, Pan troglodytes
MNPQIRNPMEWMYQRTFYYNFENEPILYGRSYTWLCYEVKIRRGHSNLLWDTGVFRGQMYSQPEHHAEMCFLSWFCGNQLSAYKCFQITWFVSWTPCPDCVAKLAKFLAEHPNVTLTISAARLYYYWERDYRRALCRLSQAGARVKIMDDEEFAYCWENFVYNEGQPFMPWYKFDDNYAFLHRTLKEIIRHLMDPDTFTFNFNNDPLVLRRHQTYLCYEVERLDNGTWVLMDQHMGFLCNEAKNLLCGFYGRHAELRFLDLVPSLQLDPAQIYRVTWFISWSPCFSWGCAGQVRAFLQENTHVRLRIFAARIYDYDPLYKEALQMLRDAGAQVSIMTYDEFEYCWDTFVYRQGCPFQPWDGLEEHSQALSGRLRAILQVRASSLCMVPHRPPPPPQSPGPCLPLCSEPPLGSLLPTGRPAPSLPFLLTASFSFPPPASLPPLPSLSLSPGHLPVPSFHSLTSCSIQPPCSSRIRETEGWASVSKEGRDLG

SEQ ID NO: 229 - protein, 190 aa, Gorilla gorilla
MNPQIRNPMKAMYPGTFYFQFKNLWEANDRNETWLCFTVEGIKRRSVVSWKTGVFRNQVDSETHCHAERCFLSWECDDILSPNTNYQVTWYTSWSPCPECAGEVAEFLARHSNVNLTIFTARLYYFQDTDYQEGLRSLSQEGVAVKIMDYKDFKYCWENFVYNDDEPFKPWKGLKYNFRFLKRRLQEILE

SEQ ID NO: 230 - protein, 202 aa, Macaca mulatta
MDGSPASRPRHLMDPNTFTFNFNNDLSVRGRHQTYLCYEVERLDNGTWVPMDERRGFLCNKAKNVPCGDYGCHVELRFLCEVPSWQLDPAQTYRVTWFISWSPCFRRGCAGQVRVFLQENKHVRLRIFAARIYDYDPLYQEALRTLRDAGAQVSIMTYEEFKHCWDTFVDRQGRPFQPWDGLDEHSQALSGRLRAILQNQGN

SEQ ID NO: 231 - protein, 185 aa, Bos taurus
MDEYTFTENFNNQGWPSKTYLCYEMERLDGDATIPLDEYKGFVRNKGLDQPEKPCHAELYFLGKIHSWNLDRNQHYRLTCFISWSPCYDCAQKLTTFLKENHHISLHILASRIYTHNRFGCHQSGLCELQAAGARITIMTFEDFKHCWETFVDHKGKPFQPWEGLNVKSQALCTELQAILKTQQN

SEQ ID NO: 232 - protein, 200 aa, Homo sapiens
MALLTAETFRLQFNNKRRLRRPYYPRKALLCYQLTPQNGSTPTRGYFENKKKCHAEICFINEIKSMGLDETQCYQVTCYLTWSPCSSCAWELVDFIKAHDHLNLGIFASRLYYHWCKPQQKGLRLLCGSQVPVEVMGFPKFADCWENFVDHEKPLSFNPYKMLEELDKNSRAIKRRLERIKIPGVRAQGRYMDILCDAEV

SEQ ID NO: 233 - protein, 210 aa, Macaca mulatta
MALLTAKTFSLQFNNKRRVNKPYYPRKALLCYQLTPQNGSTPTRGHLKNKKKDHAEIRFINKIKSMGLDETQCYQVTCYLTWSPCPSCAGELVDFIKAHRHLNLRIFASRLYYHWRPNYQEGLLLLCGSQVPVEVMGLPEFTDCWENFVDHKEPPSFNPSEKLEELDKNSQAIKRRLERIKSRSVDVLENGLRSLQLGPVTPSSSIRNSR

SEQ ID NO: 234 - protein, 224 aa, Rattus norvegicus
MAQKEEAAEAAAPASQNGDDLENLEDPEKLKELIDLPPFEIVTGVRLPVNFFKFQFRNVEYSSGRNKTFLCYVVEAQSKGGQVQATQGYLEDEHAGAHAEEAFFNTILPAFDPALKYNVTWYVSSSPCAACADRILKTLSKTKNLRLLILVSRLFMWEEPEVQAALKKLKEAGCKLRIMKPQDFEYLWQNFVEQEEGESKAFEPWEDIQENFLYYEEKLADILK

SEQ ID NO: 235 - protein, 208 aa, Petromyzon marinus
MTDAEYVRIHEKLDIYTFKKQFFNNKKSVSHRCYVLFELKRRGERRACFWGYAVNKPQSGTERGIHAEIFSIRKVEEYLRDNPGQFTINWYSSWSPCADCAEKILEWYNQELRGNGHTLKIWACKLYYEKNARNQIGLWNLRDNGVGLNVMVSEHYQCCRKIFIQSSHNQLNENRWLEKTLKRAEKRRSELSFMIQVKILHTTKSPAV

SEQ ID NO: 236 - protein, 182 aa, Homo sapiens
MDPPTFTFNFNNEPWWGRHETYLCYEVERMHNDTWVLLNQRRGFLCNQAPHKHGFLEGRHAELCFLDVIPFWKLDLDQDYRVTCFTSWSPCFSCAQEMAKFISKNKHVSLCIFTARIYDDQGRCQEGLRTLAEAGAKISFTYSEFKHCWDTFVDHQGCPFQPWDGLDEHSQDLSGRLRAILQ

SEQ ID NO: 237 - protein, 8 aa, Artificial Sequence
  Description of Artificial Sequence: Synthetic peptide
SGGSSGGS

SEQ ID NO: 238 - protein, 1609 aa, Artificial Sequence
  Description of Artificial Sequence: Synthetic polypeptide
MSEVEFSHEYWMRHALTLAKRARDEREVPVGAVLVLNNRVIGEGWNRAIGLHDPTAHAEIMALRQGGLVMQNYRLIDATLYVTFEPCVMCAGAMIHSRIGRVVFGVRNAKTGAAGSLMDVLHYPGMNHRVEITEGILADECAALLCTFFRMPRQVFNAQKKAQSSTDSGGSSGGSSGSETPGTSESATPESSGGSSGGSEIGKATAKYFFYSNIMNFFKTEITLANGEIRKRPLIETNGETGEIVWDKGRDFATVRKVLSMPQVNIVKKTEVQTGGFSKESILPKRNSDKLIARKKDWDPKKYGGFMQPTVAYSVLVVAKVEKGKSKKLKSVKELLGITIMERSSFEKNPIDFLEAKGYKEVKKDLIIKLPKYSLFELENGRKRMLASAKFLQKGNELALPSKYVNFLYLASHYEKLKGSPEDNEQKQLFVEQHKHYLDEIIEQISEFSKRVILADANLDKVLSAYNKHRDKPIREQAENIIHLFTLTNLGAPRAFKYFDTTIARKEYRSTKEVLDATLIHQSITGLYETRIDLSQLGGDGGSGGSGGSGGSGGSGGSGGMDKKYSIGLAIGTNSVGWAVITDEYKVPSKKFKVLGNTDRHSIKKNLIGALLFDSGETAEATRLKRTARRRYTRRKNRICYLQEIFSNEMAKVDDSFFHRLEESFLVEEDKKHERHPIFGNIVDEVAYHEKYPTIYHLRKKLVDSTDKADLRLIYLALAHMIKFRGHFLIEGDLNPDNSDVDKLFIQLVQTYNQLFEENPINASGVDAKAILSARLSKSRRLENLIAQLPGEKKNGLFGNLIALSLGLTPNFKSNFDLAEDAKLQLSKDTYDDDLDNLLAQIGDQYADLFLAAKNLSDAILLSDILRVNTEITKAPLSASMIKRYDEHHQDLTLLKALVRQQLPEKYKEIFFDQSKNGYAGYIDGGASQEEFYKFIKPILEKMDGTEELLVKLNREDLLRKQRTFDNGSIPHQIHLGELHAILRRQEDFYPFLKDNREKIEKILTFRIPYYVGPLARGNSRFAWMTRKSEETITPWNFEEVVDKGASAQSFIERMTNFDKNLPNEKVLPKHSLLYEYFTVYNELTKVKYVTEGMRKPAFLSGEQKKAIVDLLFKTNRKVTVKQLKEDYFKKIECFDSVEISGVEDRFNASLGTYHDLLKIIKDKDFLDNEENEDILEDIVLTLTLFEDREMIEERLKTYAHLFDDKVMKQLKRRRYTGWGRLSRKLINGIRDKQSGKTILDFLKSDGFANRNFMQLIHDDSLTFKEDIQKAQVSGQGDSLHEHIANLAGSPAIKKGILQTVKVVDELVKVMGRHKPENIVIEMARENQTTQKGQKNSRERMKRIEEGIKELGSQILKEHPVENTQLQNEKLYLYYLQNGRDMYVDQELDINRLSDYDVDHIVPQSFLKDDSIDNKVLTRSDKNRGKSDNVPSEEVVKKMKNYWRQLLNAKLITQRKFDNLTKAERGGLSELDKAGFIKRQLVETRQITKHVAQILDSRMNTKYDENDKLIREVKVITLKSKLVSDFRKDFQFYKVREINNYHHAHDAYLNAVVGTALIKKYPKLESEFVYGDYKVYDVRKMIAKSEQEGADKRTADGSEFESPKKKRKV

SEQ ID NO: 239 - protein, 1807 aa, Artificial Sequence
  Description of Artificial Sequence: Synthetic polypeptide
MSEVEFSHEYWMRHALTLAKRAWDEREVPVGAVLVHNNRVIGEGWNRPIGRHDPTAHAEIMALRQGGLVMQNYRLIDATLYVTLEPCVMCAGAMIHSRIGRVVFGARDAKTGAAGSLMDVLHHPGMNHRVEITEGILADECAALLSDFFRMRRQEIKAQKKAQSSTDGGSSGGSSGSETPGTSESATPESSGGSSGGSMSEVEFSHEYWMRHALTLAKRARDEREVPVGAVLVLNNRVIGEGWNRAIGLHDPTAHAEIMALRQGGLVMQNYRLIDATLYVTFEPCVMCAGAMIHSRIGRVVFGVRNAKTGAAGSLMDVLHYPGMNHRVEITEGILADECAALLCTFFRMPRQVFNAQKKAQSSTDSGGSSGGSSGSETPGTSESATPESSGGSSGGSEIGKATAKYFFYSNIMNFFKTEITLANGEIRKRPLIETNGETGEIVWDKGRDFATVRKVLSMPQVNIVKKTEVQTGGFSKESILPKRNSDKLIARKKDWDPKKYGGFMQPTVAYSVLVVAKVEKGKSKKLKSVKELLGITIMERSSFEKNPIDFLEAKGYKEVKKDLIIKLPKYSLFELENGRKRMLASAKFLQKGNELALPSKYVNFLYLASHYEKLKGSPEDNEQKQLFVEQHKHYLDEIIEQISEFSKRVILADANLDKVLSAYNKHRDKPIREQAENIIHLFTLTNLGAPRAFKYFDTTIARKEYRSTKEVLDATLIHQSITGLYETRIDLSQLGGDGGSGGSGGSGGSGGSGGSGGMDKKYSIGLAIGTNSVGWAVITDEYKVPSKKFKVLGNTDRHSIKKNLIGALLFDSGETAEATRLKRTARRRYTRRKNRICYLQEIFSNEMAKVDDSFFHRLEESFLVEEDKKHERHPIFGNIVDEVAYHEKYPTIYHLRKKLVDSTDKADLRLIYLALAHMIKFRGHFLIEGDLNPDNSDVDKLFIQLVQTYNQLFEENPINASGVDAKAILSARLSKSRRLENLIAQLPGEKKNGLFGNLIALSLGLTPNFKSNFDLAEDAKLQLSKDTYDDDLDNLLAQIGDQYADLFLAAKNLSDAILLSDILRVNTEITKAPLSASMIKRYDEHHQDLTLLKALVRQQLPEKYKEIFFDQSKNGYAGYIDGGASQEEFYKFIKPILEKMDGTEELLVKLNREDLLRKQRTFDNGSIPHQIHLGELHAILRRQEDFYPFLKDNREKIEKILTFRIPYYVGPLARGNSRFAWMTRKSEETITPWNFEEVVDKGASAQSFIERMTNFDKNLPNEKVLPKHSLLYEYFTVYNELTKVKYVTEGMRKPAFLSGEQKKAIVDLLFKTNRKVTVKQLKEDYFKKIECFDSVEISGVEDRFNASLGTYHDLLKIIKDKDFLDNEENEDILEDIVLTLTLFEDREMIEERLKTYAHLFDDKVMKQLKRRRYTGWGRLSRKLINGIRDKQSGKTILDFLKSDGFANRNFMQLIHDDSLTFKEDIQKAQVSGQGDSLHEHIANLAGSPAIKKGILQTVKVVDELVKVMGRHKPENIVIEMARENQTTQKGQKNSRERMKRIEEGIKELGSQILKEHPVENTQLQNEKLYLYYLQNGRDMYVDQELDINRLSDYDVDHIVPQSFLKDDSIDNKVLTRSDKNRGKSDNVPSEEVVKKMKNYWRQLLNAKLITQRKFDNLTKAERGGLSELDKAGFIKRQLVETRQITKHVAQILDSRMNTKYDENDKLIREVKVITLKSKLVSDFRKDFQFYKVREINNYHHAHDAYLNAVVGTALIKKYPKLESEFVYGDYKVYDVRKMIAKSEQEGADKRTADGSEFESPKKKRKV

SEQ ID NO: 240 - protein, 1588 aa, Artificial Sequence
  Description of Artificial Sequence: Synthetic polypeptide
MSEVEFSHEYWMRHALTLAKRARDEREVPVGAVLVLNNRVIGEGWNRAIGLHDPTAHAEIMALRQGGLVMQNYRLIDATLYVTFEPCVMCAGAMIHSRIGRVVFGVRNAKTGAAGSLMDVLHHPGMNHRVEITEGILADECAALLCRFFRMPRRVFNAQKKAQSSTDSGGSSGGSSGSETPGTSESATPESSGGSSGGSDKKYSIGLAIGTNSVGWAVITDEYKVPSKKFKVLGNTDRHSIKKNLIGALLFDSGETAEATRLKRTARRRYTRRKNRICYLQEIFSNEMAKVDDSFFHRLEESFLVEEDKKHERHPIFGNIVDEVAYHEKYPTIYHLRKKLVDSTDKADLRLIYLALAHMIKFRGHFLIEGDLNPDNSDVDKLFIQLVQTYNQLFEENPINASGVDAKAILSARLSKSRRLENLIAQLPGEKKNGLFGNLIALSLGLTPNFKSNFDLAEDAKLQLSKDTYDDDLDNLLAQIGDQYADLFLAAKNLSDAILLSDILRVNTEITKAPLSASMIKRYDEHHQDLTLLKALVRQQLPEKYKEIFFDQSKNGYAGYIDGGASQEEFYKFIKPILEKMDGTEELLVKLNREDLLRKQRTFDNGSIPHQIHLGELHAILRRQEDFYPFLKDNREKIEKILTFRIPYYVGPLARGNSRFAWMTRKSEETITPWNFEEVVDKGASAQSFIERMTNFDKNLPNEKVLPKHSLLYEYFTVYNELTKVKYVTEGMRKPAFLSGEQKKAIVDLLFKTNRKVTVKQLKEDYFKKIECFDSVEISGVEDRFNASLGTYHDLLKIIKDKDFLDNEENEDILEDIVLTLTLFEDREMIEERLKTYAHLFDDKVMKQLKRRRYTGWGRLSRKLINGIRDKQSGKTILDFLKSDGFANRNFMQLIHDDSLTFKEDIQKAQVSGQGDSLHEHIANLAGSPAIKKGILQTVKVVDELVKVMGRHKPENIVIEMARENQTTQKGQKNSRERMKRIEEGIKELGSQILKEHPVENTQLQNEKLYLYYLQNGRDMYVDQELDINRLSDYDVDHIVPQSFLKDDSIDNKVLTRSDKNRGKSDNVPSEEVVKKMKNYWRQLLNAKLITQRKFDNLTKAERGGLSELDKAGFIKRQLVETRQITKHVAQILDSRMNTKYDENDKLIREVKVITLKSKLVSDFRKDFQFYKVREINNYHHAHDAYLNAVVGTALIKKYPKLESEFVYGDYKVYDVRKMIAKSEQEIGKATAKYFFYSNIMNFFKTEITLANGEIRKRPLIETNGETGEIVWDKGRDFATVRKVLSMPQVNIVKKTEVQTGGFSKESILPKRNSDKLIARKKDWDPKKYGGFDSPTVAYSVLVVAKVEKGKSKKLKSVKELLGITIMERSSFEKNPIDFLEAKGYKEVKKDLIIKLPKYSLFELENGRKRMLASAGELQKGNELALPSKYVNFLYLASHYEKLKGSPEDNEQKQLFVEQHKHYLDEIIEQISEFSKRVILADANLDKVLSAYNKHRDKPIREQAENIIHLFTLTNLGAPAAFKYFDTTIDRKRYTSTKEVLDATLIHQSITGLYETRIDLSQLGGDEGADKRTADGSEFESPKKKRKV

SEQ ID NO: 241 - protein, 1786 aa, Artificial Sequence
  Description of Artificial Sequence: Synthetic polypeptide
MSEVEFSHEYWMRHALTLAKRAWDEREVPVGAVLVHNNRVIGEGWNRPIGRHDPTAHAEIMALRQGGLVMQNYRLIDATLYVTLEPCVMCAGAMIHSRIGRVVFGARDAKTGAAGSLMDVLHHPGMNHRVEITEGILADECAALLSDFFRMRRQEIKAQKKAQSSTDSGGSSGGSSGSETPGTSESATPESSGGSSGGSSEVEFSHEYWMRHALTLAKRARDEREVPVGAVLVLNNRVIGEGWNRAIGLHDPTAHAEIMALRQGGLVMQNYRLIDATLYVTFEPCVMCAGAMIHSRIGRVVFGVRNAKTGAAGSLMDVLHHPGMNHRVEITEGILADECAALLCRFFRMPRRVFNAQKKAQSSTDSGGSSGGSSGSETPGTSESATPESSGGSSGGSDKKYSIGLAIGTNSVGWAVITDEYKVPSKKFKVLGNTDRHSIKKNLIGALLFDSGETAEATRLKRTARRRYTRRKNRICYLQEIFSNEMAKVDDSFFHRLEESFLVEEDKKHERHPIFGNIVDEVAYHEKYPTIYHLRKKLVDSTDKADLRLIYLALAHMIKFRGHFLIEGDLNPDNSDVDKLFIQLVQTYNQLFEENPINASGVDAKAILSARLSKSRRLENLIAQLPGEKKNGLFGNLIALSLGLTPNFKSNFDLAEDAKLQLSKDTYDDDLDNLLAQIGDQYADLFLAAKNLSDAILLSDILRVNTEITKAPLSASMIKRYDEHHQDLTLLKALVRQQLPEKYKEIFFDQSKNGYAGYIDGGASQEEFYKFIKPILEKMDGTEELLVKLNREDLLRKQRTFDNGSIPHQIHLGELHAILRRQEDFYPFLKDNREKIEKILTFRIPYYVGPLARGNSRFAWMTRKSEETITPWNFEEVVDKGASAQSFIERMTNFDKNLPNEKVLPKHSLLYEYFTVYNELTKVKYVTEGMRKPAFLSGEQKKAIVDLLFKTNRKVTVKQLKEDYFKKIECFDSVEISGVEDRFNASLGTYHDLLKIIKDKDFLDNEENEDILEDIVLTLTLFEDREMIEERLKTYAHLFDDKVMKQLKRRRYTGWGRLSRKLINGIRDKQSGKTILDFLKSDGFANRNFMQLIHDDSLTFKEDIQKAQVSGQGDSLHEHIANLAGSPAIKKGILQTVKVVDELVKVMGRHKPENIVIEMARENQTTQKGQKNSRERMKRIEEGIKELGSQILKEHPVENTQLQNEKLYLYYLQNGRDMYVDQELDINRLSDYDVDHIVPQSFLKDDSIDNKVLTRSDKNRGKSDNVPSEEVVKKMKNYWRQLLNAKLITQRKFDNLTKAERGGLSELDKAGFIKRQLVETRQITKHVAQILDSRMNTKYDENDKLIREVKVITLKSKLVSDFRKDFQFYKVREINNYHHAHDAYLNAVVGTALIKKYPKLESEFVYGDYKVYDVRKMIAKSEQEIGKATAKYFFYSNIMNFFKTEITLANGEIRKRPLIETNGETGEIVWDKGRDFATVRKVLSMPQVNIVKKTEVQTGGFSKESILPKRNSDKLIARKKDWDPKKYGGFDSPTVAYSVLVVAKVEKGKSKKLKSVKELLGITIMERSSFEKNPIDFLEAKGYKEVKKDLIIKLPKYSLFELENGRKRMLASAGELQKGNELALPSKYVNFLYLASHYEKLKGSPEDNEQKQLFVEQHKHYLDEIIEQISEFSKRVILADANLDKVLSAYNKHRDKPIREQAENIIHLFTLTNLGAPAAFKYFDTTIDRKRYTSTKEVLDATLIHQSITGLYETRIDLSQLGGDEGADKRTADGSEFESPKKKRKV

SEQ ID NO: 242 - protein, 1588 aa, Artificial Sequence
  Description of Artificial Sequence: Synthetic polypeptide
MSEVEFSHEYWMRHALTLAKRARDEREVPVGAVLVLNNRVIGEGWNRAIGLHDPTAHAEIMALRQGGLVMQNYRLYDATLYVTFEPCVMCAGAMIHSRIGRVVFGVRNAKTGAAGSLMDVLHHPGMNHRVEITEGILADECAALLCRFFRMPRRVFNAQKKAQSSTDSGGSSGGSSGSETPGTSESATPESSGGSSGGSDKKYSIGLAIGTNSVGWAVITDEYKVPSKKFKVLGNTDRHSIKKNLIGALLFDSGETAEATRLKRTARRRYTRRKNRICYLQEIFSNEMAKVDDSFFHRLEESFLVEEDKKHERHPIFGNIVDEVAYHEKYPTIYHLRKKLVDSTDKADLRLIYLALAHMIKFRGHFLIEGDLNPDNSDVDKLFIQLVQTYNQLFEENPINASGVDAKAILSARLSKSRRLENLIAQLPGEKKNGLFGNLIALSLGLTPNFKSNFDLAEDAKLQLSKDTYDDDLDNLLAQIGDQYADLFLAAKNLSDAILLSDILRVNTEITKAPLSASMIKRYDEHHQDLTLLKALVRQQLPEKYKEIFFDQSKNGYAGYIDGGASQEEFYKFIKPILEKMDGTEELLVKLNREDLLRKQRTFDNGSIPHQIHLGELHAILRRQEDFYPFLKDNREKIEKILTFRIPYYVGPLARGNSRFAWMTRKSEETITPWNFEEVVDKGASAQSFIERMTNFDKNLPNEKVLPKHSLLYEYFTVYNELTKVKYVTEGMRKPAFLSGEQKKAIVDLLFKTNRKVTVKQLKEDYFKKIECFDSVEISGVEDRFNASLGTYHDLLKIIKDKDFLDNEENEDILEDIVLTLTLFEDREMIEERLKTYAHLFDDKVMKQLKRRRYTGWGRLSRKLINGIRDKQSGKTILDFLKSDGFANRNFMQLIHDDSLTFKEDIQKAQVSGQGDSLHEHIANLAGSPAIKKGILQTVKVVDELVKVMGRHKPENIVIEMARENQTTQKGQKNSRERMKRIEEGIKELGSQILKEHPVENTQLQNEKLYLYYLQNGRDMYVDQELDINRLSDYDVDHIVPQSFLKDDSIDNKVLTRSDKNRGKSDNVPSEEVVKKMKNYWRQLLNAKLITQRKFDNLTKAERGGLSELDKAGFIKRQLVETRQITKHVAQILDSRMNTKYDENDKLIREVKVITLKSKLVSDFRKDFQFYKVREINNYHHAHDAYLNAVVGTALIKKYPKLESEFVYGDYKVYDVRKMIAKSEQEIGKATAKYFFYSNIMNFFKTEITLANGEIRKRPLIETNGETGEIVWDKGRDFATVRKVLSMPQVNIVKKTEVQTGGFSKESILPKRNSDKLIARKKDWDPKKYGGFDSPTVAYSVLVVAKVEKGKSKKLKSVKELLGITIMERSSFEKNPIDFLEAKGYKEVKKDLIIKLPKYSLFELENGRKRMLASAGELQKGNELALPSKYVNFLYLASHYEKLKGSPEDNEQKQLFVEQHKHYLDEIIEQISEFSKRVILADANLDKVLSAYNKHRDKPIREQAENIIHLFTLTNLGAPAAFKYFDTTIDRKRYTSTKEVLDATLIHQSITGLYETRIDLSQLGGDEGADKRTADGSEFESPKKKRKV

SEQ ID NO: 243 - protein, 1786 aa, Artificial Sequence
  Description of Artificial Sequence: Synthetic polypeptide
MSEVEFSHEYWMRHALTLAKRAWDEREVPVGAVLVHNNRVIGEGWNRPIGRHDPTAHAEIMALRQGGLVMQNYRLIDATLYVTLEPCVMCAGAMIHSRIGRVVFGARDAKTGAAGSLMDVLHHPGMNHRVEITEGILADECAALLSDFFRMRRQEIKAQKKAQSSTDSGGSSGGSSGSETPGTSESATPESSGGSSGGSSEVEFSHEYWMRHALTLAKRARDEREVPVGAVLVLNNRVIGEGWNRAIGLHDPTAHAEIMALRQGGLVMQNYRLYDATLYVTFEPCVMCAGAMIHSRIGRVVFGVRNAKTGAAGSLMDVLHHPGMNHRVEITEGILADECAALLCRFFRMPRRVFNAQKKAQSSTDSGGSSGGSSGSETPGTSESATPESSGGSSGGSDKKYSIGLAIGTNSVGWAVITDEYKVPSKKFKVLGNTDRHSIKKNLIGALLFDSGETAEATRLKRTARRRYTRRKNRICYLQEIFSNEMAKVDDSFFHRLEESFLVEEDKKHERHPIFGNIVDEVAYHEKYPTIYHLRKKLVDSTDKADLRLIYLALAHMIKFRGHFLIEGDLNPDNSDVDKLFIQLVQTYNQLFEENPINASGVDAKAILSARLSKSRRLENLIAQLPGEKKNGLFGNLIALSLGLTPNFKSNFDLAEDAKLQLSKDTYDDDLDNLLAQIGDQYADLFLAAKNLSDAILLSDILRVNTEITKAPLSASMIKRYDEHHQDLTLLKALVRQQLPEKYKEIFFDQSKNGYAGYIDGGASQEEFYKFIKPILEKMDGTEELLVKLNREDLLRKQRTFDNGSIPHQIHLGELHAILRRQEDFYPFLKDNREKIEKILTFRIPYYVGPLARGNSRFAWMTRKSEETITPWNFEEVVDKGASAQSFIERMTNFDKNLPNEKVLPKHSLLYEYFTVYNELTKVKYVTEGMRKPAFLSGEQKKAIVDLLFKTNRKVTVKQLKEDYFKKIECFDSVEISGVEDRFNASLGTYHDLLKIIKDKDFLDNEENEDILEDIVLTLTLFEDREMIEERLKTYAHLFDDKVMKQLKRRRYTGWGRLSRKLINGIRDKQSGKTILDFLKSDGFANRNFMQLIHDDSLTFKEDIQKAQVSGQGDSLHEHIANLAGSPAIKKGILQTVKVVDELVKVMGRHKPENIVIEMARENQTTQKGQKNSRERMKRIEEGIKELGSQILKEHPVENTQLQNEKLYLYYLQNGRDMYVDQELDINRLSDYDVDHIVPQSFLKDDSIDNKVLTRSDKNRGKSDNVPSEEVVKKMKNYWRQLLNAKLITQRKFDNLTKAERGGLSELDKAGFIKRQLVETRQITKHVAQILDSRMNTKYDENDKLIREVKVITLKSKLVSDFRKDFQFYKVREINNYHHAHDAYLNAVVGTALIKKYPKLESEFVYGDYKVYDVRKMIAKSEQEIGKATAKYFFYSNIMNFFKTEITLANGEIRKRPLIETNGETGEIVWDKGRDFATVRKVLSMPQVNIVKKTEVQTGGFSKESILPKRNSDKLIARKKDWDPKKYGGFDSPTVAYSVLVVAKVEKGKSKKLKSVKELLGITIMERSSFEKNPIDFLEAKGYKEVKKDLIIKLPKYSLFELENGRKRMLASAGELQKGNELALPSKYVNFLYLASHYEKLKGSPEDNEQKQLFVEQHKHYLDEIIEQISEFSKRVILADANLDKVLSAYNKHRDKPIREQAENIIHLFTLTNLGAPAAFKYFDTTIDRKRYTSTKEVLDATLIHQSITGLYETRIDLSQLGGDEGADKRTADGSEFESPKKKRKV

SEQ ID NO: 244 - protein, 1588 aa, Artificial Sequence
  Description of Artificial Sequence: Synthetic polypeptide
MSEVEFSHEYWMRHALTLAKRARDEREVPVGAVLVLNNRVIGEGWNRAIGLHDPTAHAEIMALRQGGLVMQNYRLIDATLYSTFEPCVMCAGAMIHSRIGRVVFGVRNAKTGAAGSLMDVLHYPGMNHRVEITEGILADECAALLCYFFRMPRRVFNAQKKAQSSTDSGGSSGGSSGSETPGTSESATPESSGGSSGGSDKKYSIGLAIGTNSVGWAVITDEYKVPSKKFKVLGNTDRHSIKKNLIGALLFDSGETAEATRLKRTARRRYTRRKNRICYLQEIFSNEMAKVDDSFFHRLEESFLVEEDKKHERHPIFGNIVDEVAYHEKYPTIYHLRKKLVDSTDKADLRLIYLALAHMIKFRGHFLIEGDLNPDNSDVDKLFIQLVQTYNQLFEENPINASGVDAKAILSARLSKSRRLENLIAQLPGEKKNGLFGNLIALSLGLTPNFKSNFDLAEDAKLQLSKDTYDDDLDNLLAQIGDQYADLFLAAKNLSDAILLSDILRVNTEITKAPLSASMIKRYDEHHQDLTLLKALVRQQLPEKYKEIFFDQSKNGYAGYIDGGASQEEFYKFIKPILEKMDGTEELLVKLNREDLLRKQRTFDNGSIPHQIHLGELHAILRRQEDFYPFLKDNREKIEKILTFRIPYYVGPLARGNSRFAWMTRKSEETITPWNFEEVVDKGASAQSFIERMTNFDKNLPNEKVLPKHSLLYEYFTVYNELTKVKYVTEGMRKPAFLSGEQKKAIVDLLFKTNRKVTVKQLKEDYFKKIECFDSVEISGVEDRFNASLGTYHDLLKIIKDKDFLDNEENEDILEDIVLTLTLFEDREMIEERLKTYAHLFDDKVMKQLKRRRYTGWGRLSRKLINGIRDKQSGKTILDFLKSDGFANRNFMQLIHDDSLTFKEDIQKAQVSGQGDSLHEHIANLAGSPAIKKGILQTVKVVDELVKVMGRHKPENIVIEMARENQTTQKGQKNSRERMKRIEEGIKELGSQILKEHPVENTQLQNEKLYLYYLQNGRDMYVDQELDINRLSDYDVDHIVPQSFLKDDSIDNKVLTRSDKNRGKSDNVPSEEVVKKMKNYWRQLLNAKLITQRKFDNLTKAERGGLSELDKAGFIKRQLVETRQITKHVAQILDSRMNTKYDENDKLIREVKVITLKSKLVSDFRKDFQFYKVREINNYHHAHDAYLNAVVGTALIKKYPKLESEFVYGDYKVYDVRKMIAKSEQEIGKATAKYFFYSNIMNFFKTEITLANGEIRKRPLIETNGETGEIVWDKGRDFATVRKVLSMPQVNIVKKTEVQTGGFSKESILPKRNSDKLIARKKDWDPKKYGGFDSPTVAYSVLVVAKVEKGKSKKLKSVKELLGITIMERSSFEKNPIDFLEAKGYKEVKKDLIIKLPKYSLFELENGRKRMLASAGELQKGNELALPSKYVNFLYLASHYEKLKGSPEDNEQKQLFVEQHKHYLDEIIEQISEFSKRVILADANLDKVLSAYNKHRDKPIREQAENIIHLFTLTNLGAPAAFKYFDTTIDRKRYTSTKEVLDATLIHQSITGLYETRIDLSQLGGDEGADKRTADGSEFESPKKKRKV

SEQ ID NO: 245 - protein, 1786 aa, Artificial Sequence
  Description of Artificial Sequence: Synthetic polypeptide
MSEVEFSHEYWMRHALTLAKRAWDEREVPVGAVLVHNNRVIGEGWNRPIGRHDPTAHAEIMALRQGGLVMQNYRLIDATLYVTLEPCVMCAGAMIHSRIGRVVFGARDAKTGAAGSLMDVLHHPGMNHRVEITEGILADECAALLSDFFRMRRQEIKAQKKAQSSTDSGGSSGGSSGSETPGTSESATPESSGGSSGGSSEVEFSHEYWMRHALTLAKRARDEREVPVGAVLVLNNRVIGEGWNRAIGLHDPTAHAEIMALRQGGLVMQNYRLIDATLYSTFEPCVMCAGAMIHSRIGRVVFGVRNAKTGAAGSLMDVLHYPGMNHRVEITEGILADECAALLCYFFRMPRRVFNAQKKAQSSTDSGGSSGGSSGSETPGTSESATPESSGGSSGGSDKKYSIGLAIGTNSVGWAVITDEYKVPSKKFKVLGNTDRHSIKKNLIGALLFDSGETAEATRLKRTARRRYTRRKNRICYLQEIFSNEMAKVDDSFFHRLEESFLVEEDKKHERHPIFGNIVDEVAYHEKYPTIYHLRKKLVDSTDKADLRLIYLALAHMIKFRGHFLIEGDLNPDNSDVDKLFIQLVQTYNQLFEENPINASGVDAKAILSARLSKSRRLENLIAQLPGEKKNGLFGNLIALSLGLTPNFKSNFDLAEDAKLQLSKDTYDDDLDNLLAQIGDQYADLFLAAKNLSDAILLSDILRVNTEITKAPLSASMIKRYDEHHQDLTLLKALVRQQLPEKYKEIFFDQSKNGYAGYIDGGASQEEFYKFIKPILEKMDGTEELLVKLNREDLLRKQRTFDNGSIPHQIHLGELHAILRRQEDFYPFLKDNREKIEKILTFRIPYYVGPLARGNSRFAWMTRKSEETITPWNFEEVVDKGASAQSFIERMTNFDKNLPNEKVLPKHSLLYEYFTVYNELTKVKYVTEGMRKPAFLSGEQKKAIVDLLFKTNRKVTVKQLKEDYFKKIECFDSVEISGVEDRFNASLGTYHDLLKIIKDKDFLDNEENEDILEDIVLTLTLFEDREMIEERLKTYAHLFDDKVMKQLKRRRYTGWGRLSRKLINGIRDKQSGKTILDFLKSDGFANRNFMQLIHDDSLTFKEDIQKAQVSGQGDSLHEHIANLAGSPAIKKGILQTVKVVDELVKVMGRHKPENIVIEMARENQTTQKGQKNSRERMKRIEEGIKELGSQILKEHPVENTQLQNEKLYLYYLQNGRDMYVDQELDINRLSDYDVDHIVPQSFLKDDSIDNKVLTRSDKNRGKSDNVPSEEVVKKMKNYWRQLLNAKLITQRKFDNLTKAERGGLSELDKAGFIKRQLVETRQITKHVAQILDSRMNTKYDENDKLIREVKVITLKSKLVSDFRKDFQFYKVREINNYHHAHDAYLNAVVGTALIKKYPKLESEFVYGDYKVYDVRKMIAKSEQEIGKATAKYFFYSNIMNFFKTEITLANGEIRKRPLIETNGETGEIVWDKGRDFATVRKVLSMPQVNIVKKTEVQTGGFSKESILPKRNSDKLIARKKDWDPKKYGGFDSPTVAYSVLVVAKVEKGKSKKLKSVKELLGITIMERSSFEKNPIDFLEAKGYKEVKKDLIIKLPKYSLFELENGRKRMLASAGELQKGNELALPSKYVNFLYLASHYEKLKGSPEDNEQKQLFVEQHKHYLDEIIEQISEFSKRVILADANLDKVLSAYNKHRDKPIREQAENIIHLFTLTNLGAPAAFKYFDTTIDRKRYTSTKEVLDATLIHQSITGLYETRIDLSQLGGDEGADKRTADGSEFESPKKKRKV

SEQ ID NO: 246 - protein, 1588 aa, Artificial Sequence
  Description of Artificial Sequence: Synthetic polypeptide
MSEVEFSHEYWMRHALTLAKRARDEREVPVGAVLVLNNRVIGEGWNRAIGLHDPTAHAEIMALRQGGLVMQNYRLYDATLYSTFEPCVMCAGAMIHSRIGRVVFGVRNAKTGAAGSLMDVLHHPGMNHRVEITEGILADECAALLCRFFRMPRRVFNAQKKAQSSTDSGGSSGGSSGSETPGTSESATPESSGGSSGGSDKKYSIGLAIGTNSVGWAVITDEYKVPSKKFKVLGNTDRHSIKKNLIGALLFDSGETAEATRLKRTARRRYTRRKNRICYLQEIFSNEMAKVDDSFFHRLEESFLVEEDKKHERHPIFGNIVDEVAYHEKYPTIYHLRKKLVDSTDKADLRLIYLALAHMIKFRGHFLIEGDLNPDNSDVDKLFIQLVQTYNQLFEENPINASGVDAKAILSARLSKSRRLENLIAQLPGEKKNGLFGNLIALSLGLTPNFKSNFDLAEDAKLQLSKDTYDDDLDNLLAQIGDQYADLFLAAKNLSDAILLSDILRVNTEITKAPLSASMIKRYDEHHQDLTLLKALVRQQLPEKYKEIFFDQSKNGYAGYIDGGASQEEFYKFIKPILEKMDGTEELLVKLNREDLLRKQRTFDNGSIPHQIHLGELHAILRRQEDFYPFLKDNREKIEKILTFRIPYYVGPLARGNSRFAWMTRKSEETITPWNFEEVVDKGASAQSFIERMTNFDKNLPNEKVLPKHSLLYEYFTVYNELTKVKYVTEGMRKPAFLSGEQKKAIVDLLFKTNRKVTVKQLKEDYFKKIECFDSVEISGVEDRFNASLGTYHDLLKIIKDKDFLDNEENEDILEDIVLTLTLFEDREMIEERLKTYAHLFDDKVMKQLKRRRYTGWGRLSRKLINGIRDKQSGKTILDFLKSDGFANRNFMQLIHDDSLTFKEDIQKAQVSGQGDSLHEHIANLAGSPAIKKGILQTVKVVDELVKVMGRHKPENIVIEMARENQTTQKGQKNSRERMKRIEEGIKELGSQILKEHPVENTQLQNEKLYLYYLQNGRDMYVDQELDINRLSDYDVDHIVPQSFLKDDSIDNKVLTRSDKNRGKSDNVPSEEVVKKMKNYWRQLLNAKLITQRKFDNLTKAERGGLSELDKAGFIKRQLVETRQITKHVAQILDSRMNTKYDENDKLIREVKVITLKSKLVSDFRKDFQFYKVREINNYHHAHDAYLNAVVGTALIKKYPKLESEFVYGDYKVYDVRKMIAKSEQEIGKATAKYFFYSNIMNFFKTEITLANGEIRKRPLIETNGETGEIVWDKGRDFATVRKVLSMPQVNIVKKTEVQTGGFSKESILPKRNSDKLIARKKDWDPKKYGGFDSPTVAYSVLVVAKVEKGKSKKLKSVKELLGITIMERSSFEKNPIDFLEAKGYKEVKKDLIIKLPKYSLFELENGRKRMLASAGELQKGNELALPSKYVNFLYLASHYEKLKGSPEDNEQKQLFVEQHKHYLDEIIEQISEFSKRVILADANLDKVLSAYNKHRDKPIREQAENIIHLFTLTNLGAPAAFKYFDTTIDRKRYTSTKEVLDATLIHQSITGLYETRIDLSQLGGDEGADKRTADGSEFESPKKKRKV

SEQ ID NO: 247 - protein, 1786 aa, Artificial Sequence
  Description of Artificial Sequence: Synthetic polypeptide
MSEVEFSHEYWMRHALTLAKRAWDEREVPVGAVLVHNNRVIGEGWNRPIGRHDPTAHAEIMALRQGGLVMQNYRLIDATLYVTLEPCVMCAGAMIHSRIGRVVFGARDAKTGAAGSLMDVLHHPGMNHRVEITEGILADECAALLSDFFRMRRQEIKAQKKAQSSTDSGGSSGGSSGSETPGTSESATPESSGGSSGGSSEVEFSHEYWMRHALTLAKRARDEREVPVGAVLVLNNRVIGEGWNRAIGLHDPTAHAEIMALRQGGLVMQNYRLYDATLYSTFEPCVMCAGAMIHSRIGRVVFGVRNAKTGAAGSLMDVLHHPGMNHRVEITEGILADECAALLCRFFRMPRRVFNAQKKAQSSTDSGGSSGGSSGSETPGTSESATPESSGGSSGGSDKKYSIGLAIGTNSVGWAVITDEYKVPSKKFKVLGNTDRHSIKKNLIGALLFDSGETAEATRLKRTARRRYTRRKNRICYLQEIFSNEMAKVDDSFFHRLEESFLVEEDKKHERHPIFGNIVDEVAYHEKYPTIYHLRKKLVDSTDKADLRLIYLALAHMIKFRGHFLIEGDLNPDNSDVDKLFIQLVQTYNQLFEENPINASGVDAKAILSARLSKSRRLENLIAQLPGEKKNGLFGNLIALSLGLTPNFKSNFDLAEDAKLQLSKDTYDDDLDNLLAQIGDQYADLFLAAKNLSDAILLSDILRVNTEITKAPLSASMIKRYDEHHQDLTLLKALVRQQLPEKYKEIFFDQSKNGYAGYIDGGASQEEFYKFIKPILEKMDGTEELLVKLNREDLLRKQRTFDNGSIPHQIHLGELHAILRRQEDFYPFLKDNREKIEKILTFRIPYYVGPLARGNSRFAWMTRKSEETITPWNFEEVVDKGASAQSFIERMTNFDKNLPNEKVLPKHSLLYEYFTVYNELTKVKYVTEGMRKPAFLSGEQKKAIVDLLFKTNRKVTVKQLKEDYFKKIECFDSVEISGVEDRFNASLGTYHDLLKIIKDKDFLDNEENEDILEDIVLTLTLFEDREMIEERLKTYAHLFDDKVMKQLKRRRYTGWGRLSRKLINGIRDKQSGKTILDFLKSDGFANRNFMQLIHDDSLTFKEDIQKAQVSGQGDSLHEHIANLAGSPAIKKGILQTVKVVDELVKVMGRHKPENIVIEMARENQTTQKGQKNSRERMKRIEEGIKELGSQILKEHPVENTQLQNEKLYLYYLQNGRDMYVDQELDINRLSDYDVDHIVPQSFLKDDSIDNKVLTRSDKNRGKSDNVPSEEVVKKMKNYWRQLLNAKLITQRKFDNLTKAERGGLSELDKAGFIKRQLVETRQITKHVAQILDSRMNTKYDENDKLIREVKVITLKSKLVSDFRKDFQFYKVREINNYHHAHDAYLNAVVGTALIKKYPKLESEFVYGDYKVYDVRKMIAKSEQEIGKATAKYFFYSNIMNFFKTEITLANGEIRKRPLIETNGETGEIVWDKGRDFATVRKVLSMPQVNIVKKTEVQTGGFSKESILPKRNSDKLIARKKDWDPKKYGGFDSPTVAYSVLVVAKVEKGKSKKLKSVKELLGITIMERSSFEKNPIDFLEAKGYKEVKKDLIIKLPKYSLFELENGRKRMLASAGELQKGNELALPSKYVNFLYLASHYEKLKGSPEDNEQKQLFVEQHKHYLDEIIEQISEFSKRVILADANLDKVLSAYNKHRDKPIREQAENIIHLFTLTNLGAPAAFKYFDTTIDRKRYTSTKEVLDATLIHQSITGLYETRIDLSQLGGDEGADKRTADGSEFESPKKKRKV

SEQ ID NO: 248 - protein, 1588 aa, Artificial Sequence
  Description of Artificial Sequence: Synthetic polypeptide
MSEVEFSHEYWMRHALTLAKRARDEREVPVGAVLVLNNRVIGEGWNRAIGLHDPTAHAEIMALRQGGLVMQNYRLIDATLYVTFEPCVMCAGAMIHSRIGRVVFGVRNAKTGAAGSLMDVLHYPGMNHRVEITEGILADECAALLCTFFRMPRQVFNAQKKAQSSTDSGGSSGGSSGSETPGTSESATPESSGGSSGGSDKKYSIGLAIGTNSVGWAVITDEYKVPSKKFKVLGNTDRHSIKKNLIGALLFDSGETAEATRLKRTARRRYTRRKNRICYLQEIFSNEMAKVDDSFFHRLEESFLVEEDKKHERHPIFGNIVDEVAYHEKYPTIYHLRKKLVDSTDKADLRLIYLALAHMIKFRGHFLIEGDLNPDNSDVDKLFIQLVQTYNQLFEENPINASGVDAKAILSARLSKSRRLENLIAQLPGEKKNGLFGNLIALSLGLTPNFKSNFDLAEDAKLQLSKDTYDDDLDNLLAQIGDQYADLFLAAKNLSDAILLSDILRVNTEITKAPLSASMIKRYDEHHQDLTLLKALVRQQLPEKYKEIFFDQSKNGYAGYIDGGASQEEFYKFIKPILEKMDGTEELLVKLNREDLLRKQRTFDNGSIPHQIHLGELHAILRRQEDFYPFLKDNREKIEKILTFRIPYYVGPLARGNSRFAWMTRKSEETITPWNFEEVVDKGASAQSFIERMTNFDKNLPNEKVLPKHSLLYEYFTVYNELTKVKYVTEGMRKPAFLSGEQKKAIVDLLFKTNRKVTVKQLKEDYFKKIECFDSVEISGVEDRFNASLGTYHDLLKIIKDKDFLDNEENEDILEDIVLTLTLFEDREMIEERLKTYAHLFDDKVMKQLKRRRYTGWGRLSRKLINGIRDKQSGKTILDFLKSDGFANRNFMQLIHDDSLTFKEDIQKAQVSGQGDSLHEHIANLAGSPAIKKGILQTVKVVDELVKVMGRHKPENIVIEMARENQTTQKGQKNSRERMKRIEEGIKELGSQILKEHPVENTQLQNEKLYLYYLQNGRDMYVDQELDINRLSDYDVDHIVPQSFLKDDSIDNKVLTRSDKNRGKSDNVPSEEVVKKMKNYWRQLLNAKLITQRKFDNLTKAERGGLSELDKAGFIKRQLVETRQITKHVAQILDSRMNTKYDENDKLIREVKVITLKSKLVSDFRKDFQFYKVREINNYHHAHDAYLNAVVGTALIKKYPKLESEFVYGDYKVYDVRKMIAKSEQEIGKATAKYFFYSNIMNFFKTEITLANGEIRKRPLIETNGETGEIVWDKGRDFATVRKVLSMPQVNIVKKTEVQTGGFSKESILPKRNSDKLIARKKDWDPKKYGGFVSPTVAYSVLVVAKVEKGKSKKLKSVKELLGITIMERSSFEKNPIDFLEAKGYKEVKKDLIIKLPKYSLFELENGRKRMLASARELQKGNELALPSKYVNFLYLASHYEKLKGSPEDNEQKQLFVEQHKHYLDEIIEQISEFSKRVILADANLDKVLSAYNKHRDKPIREQAENIIHLFTLTNLGAPAAFKYFDTTIDRKQYRSTKEVLDATLIHQSITGLYETRIDLSQLGGDEGADKRTADGSEFESPKKKRKV

SEQ ID NO: 249 - protein, 1588 aa, Artificial Sequence
  Description of Artificial Sequence: Synthetic polypeptide
MSEVEFSHEYWMRHALTLAKRARDEREVPVGAVLVLNNRVIGEGWNRAIGLHDPTAHAEIMALRQGGLVMQNYRLIDATLYVTFEPCVMCAGAMIHSRIGRVVFGVRNAKTGAAGSLMDVLHYPGMNHRVEITEGILADECAALLCRFFRMPRQVFNAQKKAQSSTDSGGSSGGSSGSETPGTSESATPESSGGSSGGSDKKYSIGLAIGTNSVGWAVITDEYKVPSKKFKVLGNTDRHSIKKNLIGALLFDSGETAEATRLKRTARRRYTRRKNRICYLQEIFSNEMAKVDDSFFHRLEESFLVEEDKKHERHPIFGNIVDEVAYHEKYPTIYHLRKKLVDSTDKADLRLIYLALAHMIKFRGHFLIEGDLNPDNSDVDKLFIQLVQTYNQLFEENPINASGVDAKAILSARLSKSRRLENLIAQLPGEKKNGLFGNLIALSLGLTPNFKSNFDLAEDAKLQLSKDTYDDDLDNLLAQIGDQYADLFLAAKNLSDAILLSDILRVNTEITKAPLSASMIKRYDEHHQDLTLLKALVRQQLPEKYKEIFFDQSKNGYAGYIDGGASQEEFYKFIKPILEKMDGTEELLVKLNREDLLRKQRTFDNGSIPHQIHLGELHAILRRQEDFYPFLKDNREKIEKILTFRIPYYVGPLARGNSRFAWMTRKSEETITPWNFEEVVDKGASAQSFIERMTNFDKNLPNEKVLPKHSLLYEYFTVYNELTKVKYVTEGMRKPAFLSGEQKKAIVDLLFKTNRKVTVKQLKEDYFKKIECFDSVEISGVEDRFNASLGTYHDLLKIIKDKDFLDNEENEDILEDIVLTLTLFEDREMIEERLKTYAHLFDDKVMKQLKRRRYTGWGRLSRKLINGIRDKQSGKTILDFLKSDGFANRNFMQLIHDDSLTFKEDIQKAQVSGQGDSLHEHIANLAGSPAIKKGILQTVKVVDELVKVMGRHKPENIVIEMARENQTTQKGQKNSRERMKRIEEGIKELGSQILKEHPVENTQLQNEKLYLYYLQNGRDMYVDQELDINRLSDYDVDHIVPQSFLKDDSIDNKVLTRSDKNRGKSDNVPSEEVVKKMKNYWRQLLNAKLITQRKFDNLTKAERGGLSELDKAGFIKRQLVETRQITKHVAQILDSRMNTKYDENDKLIREVKVITLKSKLVSDFRKDFQFYKVREINNYHHAHDAYLNAVVGTALIKKYPKLESEFVYGDYKVYDVRKMIAKSEQEIGKATAKYFFYSNIMNFFKTEITLANGEIRKRPLIETNGETGEIVWDKGRDFATVRKVLSMPQVNIVKKTEVQTGGFSKESILPKRNSDKLIARKKDWDPKKYGGFVSPTVAYSVLVVAKVEKGKSKKLKSVKELLGITIMERSSFEKNPIDFLEAKGYKEVKKDLIIKLPKYSLFELENGRKRMLASARELQKGNELALPSKYVNFLYLASHYEKLKGSPEDNEQKQLFVEQHKHYLDEIIEQISEFSKRVILADANLDKVLSAYNKHRDKPIREQAENIIHLFTLTNLGAPAAFKYFDTTIDRKQYRSTKEVLDATLIHQSITGLYETRIDLSQLGGDEGADKRTADGSEFESPKKKRKV

SEQ ID NO: 250 - protein, 1588 aa, Artificial Sequence
  Description of Artificial Sequence: Synthetic polypeptide
MSEVEFSHEYWMRHALTLAKRARDEREVPVGAVLVLNNRVIGEGWNRAIGLHDPTAHAEIMALRQGGLVMQNYRLIDATLYVTFEPCVMCAGAMIHSRIGRVVFGVRNAKTGAAGSLMDVLHYPGMNHRVEITEGILADECAALLCYFFRMPRSVFNAQKKAQSSTDSGGSSGGSSGSETPGTSESATPESSGGSSGGSDKKYSIGLAIGTNSVGWAVITDEYKVPSKKFKVLGNTDRHSIKKNLIGALLFDSGETAEATRLKRTARRRYTRRKNRICYLQEIFSNEMAKVDDSFFHRLEESFLVEEDKKHERHPIFGNIVDEVAYHEKYPTIYHLRKKLVDSTDKADLRLIYLALAHMIKFRGHFLIEGDLNPDNSDVDKLFIQLVQTYNQLFEENPINASGVDAKAILSARLSKSRRLENLIAQLPGEKKNGLFGNLIALSLGLTPNFKSNFDLAEDAKLQLSKDTYDDDLDNLLAQIGDQYADLFLAAKNLSDAILLSDILRVNTEITKAPLSASMIKRYDEHHQDLTLLKALVRQQLPEKYKEIFFDQSKNGYAGYIDGGASQEEFYKFIKPILEKMDGTEELLVKLNREDLLRKQRTFDNGSIPHQIHLGELHAILRRQEDFYPFLKDNREKIEKILTFRIPYYVGPLARGNSRFAWMTRKSEETITPWNFEEVVDKGASAQSFIERMTNFDKNLPNEKVLPKHSLLYEYFTVYNELTKVKYVTEGMRKPAFLSGEQKKAIVDLLFKTNRKVTVKQLKEDYFKKIECFDSVEISGVEDRFNASLGTYHDLLKIIKDKDFLDNEENEDILEDIVLTLTLFEDREMIEERLKTYAHLFDDKVMKQLKRRRYTGWGRLSRKLINGIRDKQSGKTILDFLKSDGFANRNFMQLIHDDSLTFKEDIQKAQVSGQGDSLHEHIANLAGSPAIKKGILQTVKVVDELVKVMGRHKPENIVIEMARENQTTQKGQKNSRERMKRIEEGIKELGSQILKEHPVENTQLQNEKLYLYYLQNGRDMYVDQELDINRLSDYDVDHIVPQSFLKDDSIDNKVLTRSDKNRGKSDNVPSEEVVKKMKNYWRQLLNAKLITQRKFDNLTKAERGGLSELDKAGFIKRQLVETRQITKHVAQILDSRMNTKYDENDKLIREVKVITLKSKLVSDFRKDFQFYKVREINNYHHAHDAYLNAVVGTALIKKYPKLESEFVYGDYKVYDVRKMIAKSEQEIGKATAKYFFYSNIMNFFKTEITLANGEIRKRPLIETNGETGEIVWDKGRDFATVRKVLSMPQVNIVKKTEVQTGGFSKESILPKRNSDKLIARKKDWDPKKYGGFVSPTVAYSVLVVAKVEKGKSKKLKSVKELLGITIMERSSFEKNPIDFLEAKGYKEVKKDLIIKLPKYSLFELENGRKRMLASARELQKGNELALPSKYVNFLYLASHYEKLKGSPEDNEQKQLFVEQHKHYLDEIIEQISEFSKRVILADANLDKVLSAYNKHRDKPIREQAENIIHLFTLTNLGAPAAFKYFDTTIDRKQYRSTKEVLDATLIHQSITGLYETRIDLSQLGGDEGADKRTADGSEFESPKKKRKV

SEQ ID NO: 251 - protein, 1588 aa, Artificial Sequence
  Description of Artificial Sequence: Synthetic polypeptide
MSEVEFSHEYWMRHALTLAKRARDEREVPVGAVLVLNNRVIGEGWNRAIGLHDPTAHAEIMALRQGGLVMQNYRLIDATLYVTFEPCVMCAGAMIHSRIGRVVFGVRNAKTGAAGSLMDVLHHPGMNHRVEITEGILADECAALLCYFFRMPRQVFNAQKKAQSSTDSGGSSGGSSGSETPGTSESATPESSGGSSGGSDKKYSIGLAIGTNSVGWAVITDEYKVPSKKFKVLGNTDRHSIKKNLIGALLFDSGETAEATRLKRTARRRYTRRKNRICYLQEIFSNEMAKVDDSFFHRLEESFLVEEDKKHERHPIFGNIVDEVAYHEKYPTIYHLRKKLVDSTDKADLRLIYLALAHMIKFRGHFLIEGDLNPDNSDVDKLFIQLVQTYNQLFEENPINASGVDAKAILSARLSKSRRLENLIAQLPGEKKNGLFGNLIALSLGLTPNFKSNFDLAEDAKLQLSKDTYDDDLDNLLAQIGDQYADLFLAAKNLSDAILLSDILRVNTEITKAPLSASMIKRYDEHHQDLTLLKALVRQQLPEKYKEIFFDQSKNGYAGYIDGGASQEEFYKFIKPILEKMDGTEELLVKLNREDLLRKQRTFDNGSIPHQIHLGELHAILRRQEDFYPFLKDNREKIEKILTFRIPYYVGPLARGNSRFAWMTRKSEETITPWNFEEVVDKGASAQSFIERMTNFDKNLPNEKVLPKHSLLYEYFTVYNELTKVKYVTEGMRKPAFLSGEQKKAIVDLLFKTNRKVTVKQLKEDYFKKIECFDSVEISGVEDRFNASLGTYHDLLKIIKDKDFLDNEENEDILEDIVLTLTLFEDREMIEERLKTYAHLFDDKVMKQLKRRRYTGWGRLSRKLINGIRDKQSGKTILDFLKSDGFANRNFMQLIHDDSLTFKEDIQKAQVSGQGDSLHEHIANLAGSPAIKKGILQTVKVVDELVKVMGRHKPENIVIEMARENQTTQKGQKNSRERMKRIEEGIKELGSQILKEHPVENTQLQNEKLYLYYLQNGRDMYVDQELDINRLSDYDVDHIVPQSFLKDDSIDNKVLTRSDKNRGKSDNVPSEEVVKKMKNYWRQLLNAKLITQRKFDNLTKAERGGLSELDKAGFIKRQLVETRQITKHVAQILDSRMNTKYDENDKLIREVKVITLKSKLVSDFRKDFQFYKVREINNYHHAHDAYLNAVVGTALIKKYPKLESEFVYGDYKVYDVRKMIAKSEQEIGKATAKYFFYSNIMNFFKTEITLANGEIRKRPLIETNGETGEIVWDKGRDFATVRKVLSMPQVNIVKKTEVQTGGFSKESILPKRNSDKLIARKKDWDPKKYGGFVSPTVAYSVLVVAKVEKGKSKKLKSVKELLGITIMERSSFEKNPIDFLEAKGYKEVKKDLIIKLPKYSLFELENGRKRMLASARELQKGNELALPSKYVNFLYLASHYEKLKGSPEDNEQKQLFVEQHKHYLDEIIEQISEFSKRVILADANLDKVLSAYNKHRDKPIREQAENIIHLFTLTNLGAPAAFKYFDTTIDRKQYRSTKEVLDATLIHQSITGLYETRIDLSQLGGDEGADKRTADGSEFESPKKKRKV

SEQ ID NO: 252 - protein, 1588 aa, Artificial Sequence
  Description of Artificial Sequence: Synthetic polypeptide
MSEVEFSHEYWMRHALTLAKRARDEREVPVGAVLVLNNRVIGEGWNRAIGLHDPTAHAEIMALRQGGLVMQNYRLIDATLYSTFEPCVMCAGAMIHSRIGRVVFGVRNAKTGAAGSLMDVLHYPGMNHRVEITEGILADECAALLCYFFRMPRQVFNAQKKAQSSTDSGGSSGGSSGSETPGTSESATPESSGGSSGGSDKKYSIGLAIGTNSVGWAVITDEYKVPSKKFKVLGNTDRHSIKKNLIGALLFDSGETAEATRLKRTARRRYTRRKNRICYLQEIFSNEMAKVDDSFFHRLEESFLVEEDKKHERHPIFGNIVDEVAYHEKYPTIYHLRKKLVDSTDKADLRLIYLALAHMIKFRGHFLIEGDLNPDNSDVDKLFIQLVQTYNQLFEENPINASGVDAKAILSARLSKSRRLENLIAQLPGEKKNGLFGNLIALSLGLTPNFKSNFDLAEDAKLQLSKDTYDDDLDNLLAQIGDQYADLFLAAKNLSDAILLSDILRVNTEITKAPLSASMIKRYDEHHQDLTLLKALVRQQLPEKYKEIFFDQSKNGYAGYIDGGASQEEFYKFIKPILEKMDGTEELLVKLNREDLLRKQRTFDNGSIPHQIHLGELHAILRRQEDFYPFLKDNREKIEKILTFRIPYYVGPLARGNSRFAWMTRKSEETITPWNFEEVVDKGASAQSFIERMTNFDKNLPNEKVLPKHSLLYEYFTVYNELTKVKYVTEGMRKPAFLSGEQKKAIVDLLFKTNRKVTVKQLKEDYFKKIECFDSVEISGVEDRFNASLGTYHDLLKIIKDKDFLDNEENEDILEDIVLTLTLFEDREMIEERLKTYAHLFDDKVMKQLKRRRYTGWGRLSRKLINGIRDKQSGKTILDFLKSDGFANRNFMQLIHDDSLTFKEDIQKAQVSGQGDSLHEHIANLAGSPAIKKGILQTVKVVDELVKVMGRHKPENIVIEMARENQTTQKGQKNSRERMKRIEEGIKELGSQILKEHPVENTQLQNEKLYLYYLQNGRDMYVDQELDINRLSDYDVDHIVPQSFLKDDSIDNKVLTRSDKNRGKSDNVPSEEVVKKMKNYWRQLLNAKLITQRKFDNLTKAERGGLSELDKAGFIKRQLVETRQITKHVAQILDSRMNTKYDENDKLIREVKVITLKSKLVSDFRKDFQFYKVREINNYHHAHDAYLNAVVGTALIKKYPKLESEFVYGDYKVYDVRKMIAKSEQEIGKATAKYFFYSNIMNFFKTEITLANGEIRKRPLIETNGETGEIVWDKGRDFATVRKVLSMPQVNIVKKTEVQTGGFSKESILPKRNSDKLIARKKDWDPKKYGGFVSPTVAYSVLVVAKVEKGKSKKLKSVKELLGITIMERSSFEKNPIDFLEAKGYKEVKKDLIIKLPKYSLFELENGRKRMLASARELQKGNELALPSKYVNFLYLASHYEKLKGSPEDNEQKQLFVEQHKHYLDEIIEQISEFSKRVILADANLDKVLSAYNKHRDKPIREQAENIIHLFTLTNLGAPAAFKYFDTTIDRKQYRSTKEVLDATLIHQSITGLYETRIDLSQLGGDEGADKRTADGSEFESPKKKRKV

SEQ ID NO: 253 - protein, 1588 aa, Artificial Sequence
  Description of Artificial Sequence: Synthetic polypeptide
MSEVEFSHEYWMRHALTLAKRARDEREVPVGAVLVLNNRVIGEGWNRAIGLHDPTAHAEIMALRQGGLVMQNYRLIDATLYVTFEPCVMCAGAMIHSRIGRVVFGVRNAKTGAAGSLMDVLHYPGMNHRVEITEGILADECAALLCYFFRMPRQVFNAQKKAQSSRDSGGSSGGSSGSETPGTSESATPESSGGSSGGSDKKYSIGLAIGTNSVGWAVITDEYKVPSKKFKVLGNTDRHSIKKNLIGALLFDSGETAEATRLKRTARRRYTRRKNRICYLQEIFSNEMAKVDDSFFHRLEESFLVEEDKKHERHPIFGNIVDEVAYHEKYPTIYHLRKKLVDSTDKADLRLIYLALAHMIKFRGHFLIEGDLNPDNSDVDKLFIQLVQTYNQLFEENPINASGVDAKAILSARLSKSRRLENLIAQLPGEKKNGLFGNLIALSLGLTPNFKSNFDLAEDAKLQLSKDTYDDDLDNLLAQIGDQYADLFLAAKNLSDAILLSDILRVNTEITKAPLSASMIKRYDEHHQDLTLLKALVRQQLPEKYKEIFFDQSKNGYAGYIDGGASQEEFYKFIKPILEKMDGTEELLVKLNREDLLRKQRTFDNGSIPHQIHLGELHAILRRQEDFYPFLKDNREKIEKILTFRIPYYVGPLARGNSRFAWMTRKSEETITPWNFEEVVDKGASAQSFIERMTNFDKNLPNEKVLPKHSLLYEYFTVYNELTKVKYVTEGMRKPAFLSGEQKKAIVDLLFKTNRKVTVKQLKEDYFKKIECFDSVEISGVEDRFNASLGTYHDLLKIIKDKDFLDNEENEDILEDIVLTLTLFEDREMIEERLKTYAHLFDDKVMKQLKRRRYTGWGRLSRKLINGIRDKQSGKTILDFLKSDGFANRNFMQLIHDDSLTFKEDIQKAQVSGQGDSLHEHIANLAGSPAIKKGILQTVKVVDELVKVMGRHKPENIVIEMARENQTTQKGQKNSRERMKRIEEGIKELGSQILKEHPVENTQLQNEKLYLYYLQNGRDMYVDQELDINRLSDYDVDHIVPQSFLKDDSIDNKVLTRSDKNRGKSDNVPSEEVVKKMKNYWRQLLNAKLITQRKFDNLTKAERGGLSELDKAGFIKRQLVETRQITKHVAQILDSRMNTKYDENDKLIREVKVITLKSKLVSDFRKDFQFYKVREINNYHHAHDAYLNAVVGTALIKKYPKLESEFVYGDYKVYDVRKMIAKSEQEIGKATAKYFFYSNIMNFFKTEITLANGEIRKRPLIETNGETGEIVWDKGRDFATVRKVLSMPQVNIVKKTEVQTGGFSKESILPKRNSDKLIARKKDWDPKKYGGFVSPTVAYSVLVVAKVEKGKSKKLKSVKELLGITIMERSSFEKNPIDFLEAKGYKEVKKDLIIKLPKYSLFELENGRKRMLASARELQKGNELALPSKYVNFLYLASHYEKLKGSPEDNEQKQLFVEQHKHYLDEIIEQISEFSKRVILADANLDKVLSAYNKHRDKPIREQAENIIHLFTLTNLGAPAAFKYFDTTIDRKQYRSTKEVLDATLIHQSITGLYETRIDLSQLGGDEGADKRTADGSEFESPKKKRKV

SEQ ID NO: 254 - protein, 1588 aa, Artificial Sequence
  Description of Artificial Sequence: Synthetic polypeptide
MSEVEFSHEYWMRHALTLAKRARDEREVPVGAVLVLNNRVIGEGWNRAIGLHDPTAHAEIMALRQGGLVMQNYRLIDATLYVTFEPCVMCAGAMIHSRIGRVVFGVRNAKTGAAGSLMDVLHYPGMNHRVEITEGILADECAALLCYFFRMPRRVFNAQKKAQSSTDSGGSSGGSSGSETPGTSESATPESSGGSSGGSDKKYSIGLAIGTNSVGWAVITDEYKVPSKKFKVLGNTDRHSIKKNLIGALLFDSGETAEATRLKRTARRRYTRRKNRICYLQEIFSNEMAKVDDSFFHRLEESFLVEEDKKHERHPIFGNIVDEVAYHEKYPTIYHLRKKLVDSTDKADLRLIYLALAHMIKFRGHFLIEGDLNPDNSDVDKLFIQLVQTYNQLFEENPINASGVDAKAILSARLSKSRRLENLIAQLPGEKKNGLFGNLIALSLGLTPNFKSNFDLAEDAKLQLSKDTYDDDLDNLLAQIGDQYADLFLAAKNLSDAILLSDILRVNTEITKAPLSASMIKRYDEHHQDLTLLKALVRQQLPEKYKEIFFDQSKNGYAGYIDGGASQEEFYKFIKPILEKMDGTEELLVKLNREDLLRKQRTFDNGSIPHQIHLGELHAILRRQEDFYPFLKDNREKIEKILTFRIPYYVGPLARGNSRFAWMTRKSEETITPWNFEEVVDKGASAQSFIERMTNFDKNLPNEKVLPKHSLLYEYFTVYNELTKVKYVTEGMRKPAFLSGEQKKAIVDLLFKTNRKVTVKQLKEDYFKKIECFDSVEISGVEDRFNASLGTYHDLLKIIKDKDFLDNEENEDILEDIVLTLTLFEDREMIEERLKTYAHLFDDKVMKQLKRRRYTGWGRLSRKLINGIRDKQSGKTILDFLKSDGFANRNFMQLIHDDSLTFKEDIQKAQVSGQGDSLHEHIANLAGSPAIKKGILQTVKVVDELVKVMGRHKPENIVIEMARENQTTQKGQKNSRERMKRIEEGIKELGSQILKEHPVENTQLQNEKLYLYYLQNGRDMYVDQELDINRLSDYDVDHIVPQSFLKDDSIDNKVLTRSDKNRGKSDNVPSEEVVKKMKNYWRQLLNAKLITQRKFDNLTKAERGGLSELDKAGFIKRQLVETRQITKHVAQILDSRMNTKYDENDKLIREVKVITLKSKLVSDFRKDFQFYKVREINNYHHAHDAYLNAVVGTALIKKYPKLESEFVYGDYKVYDVRKMIAKSEQEIGKATAKYFFYSNIMNFFKTEITLANGEIRKRPLIETNGETGEIVWDKGRDFATVRKVLSMPQVNIVKKTEVQTGGFSKESILPKRNSDKLIARKKDWDPKKYGGFVSPTVAYSVLVVAKVEKGKSKKLKSVKELLGITIMERSSFEKNPIDFLEAKGYKEVKKDLIIKLPKYSLFELENGRKRMLASARELQKGNELALPSKYVNFLYLASHYEKLKGSPEDNEQKQLFVEQHKHYLDEIIEQISEFSKRVILADANLDKVLSAYNKHRDKPIREQAENIIHLFTLTNLGAPAAFKYFDTTIDRKQYRSTKEVLDATLIHQSITGLYETRIDLSQLGGDEGADKRTADGSEFESPKKKRKV

SEQ ID NO: 255 - protein, 1588 aa, Artificial Sequence
  Description of Artificial Sequence: Synthetic polypeptide
MSEVEFSHEYWMRHALTLAKRARDEREVPVGAVLVLNNRVIGEGWNRAIGLHDPTAHAEIMALRQGGLVMQNYRLIDATLYVTFEPCVMCAGAMIHSRIGRVVFGVRNAKTGAAGSLMDVLHHPGMNHRVEITEGILADECAALLCRFFRMPRRVFNAQKKAQSSTDSGGSSGGSSGSETPGTSESATPESSGGSSGGSDKKYSIGLAIGTNSVGWAVITDEYKVPSKKFKVLGNTDRHSIKKNLIGALLFDSGETAEATRLKRTARRRYTRRKNRICYLQEIFSNEMAKVDDSFFHRLEESFLVEEDKKHERHPIFGNIVDEVAYHEKYPTIYHLRKKLVDSTDKADLRLIYLALAHMIKFRGHFLIEGDLNPDNSDVDKLFIQLVQTYNQLFEENPINASGVDAKAILSARLSKSRRLENLIAQLPGEKKNGLFGNLIALSLGLTPNFKSNFDLAEDAKLQLSKDTYDDDLDNLLAQIGDQYADLFLAAKNLSDAILLSDILRVNTEITKAPLSASMIKRYDEHHQDLTLLKALVRQQLPEKYKEIFFDQSKNGYAGYIDGGASQEEFYKFIKPILEKMDGTEELLVKLNREDLLRKQRTFDNGSIPHQIHLGELHAILRRQEDFYPFLKDNREKIEKILTFRIPYYVGPLARGNSRFAWMTRKSEETITPWNFEEVVDKGASAQSFIERMTNFDKNLPNEKVLPKHSLLYEYFTVYNELTKVKYVTEGMRKPAFLSGEQKKAIVDLLFKTNRKVTVKQLKEDYFKKIECFDSVEISGVEDRFNASLGTYHDLLKIIKDKDFLDNEENEDILEDIVLTLTLFEDREMIEERLKTYAHLFDDKVMKQLKRRRYTGWGRLSRKLINGIRDKQSGKTILDFLKSDGFANRNFMQLIHDDSLTFKEDIQKAQVSGQGDSLHEHIANLAGSPAIKKGILQTVKVVDELVKVMGRHKPENIVIEMARENQTTQKGQKNSRERMKRIEEGIKELGSQILKEHPVENTQLQNEKLYLYYLQNGRDMYVDQELDINRLSDYDVDHIVPQSFLKDDSIDNKVLTRSDKNRGKSDNVPSEEVVKKMKNYWRQLLNAKLITQRKFDNLTKAERGGLSELDKAGFIKRQLVETRQITKHVAQILDSRMNTKYDENDKLIREVKVITLKSKLVSDFRKDFQFYKVREINNYHHAHDAYLNAVVGTALIKKYPKLESEFVYGDYKVYDVRKMIAKSEQEIGKATAKYFFYSNIMNFFKTEITLANGEIRKRPLIETNGETGEIVWDKGRDFATVRKVLSMPQVNIVKKTEVQTGGFSKESILPKRNSDKLIARKKDWDPKKYGGFVSPTVAYSVLVVAKVEKGKSKKLKSVKELLGITIMERSSFEKNPIDFLEAKGYKEVKKDLIIKLPKYSLFELENGRKRMLASARELQKGNELALPSKYVNFLYLASHYEKLKGSPEDNEQKQLFVEQHKHYLDEIIEQISEFSKRVILADANLDKVLSAYNKHRDKPIREQAENIIHLFTLTNLGAPAAFKYFDTTIDRKQYRSTKEVLDATLIHQSITGLYETRIDLSQLGGDEGADKRTADGSEFESPKKKRKV

SEQ ID NO: 256 - protein, 1588 aa, Artificial Sequence
  Description of Artificial Sequence: Synthetic polypeptide
MSEVEFSHEYWMRHALTLAKRARDEREVPVGAVLVLNNRVIGEGWNRAIGLHDPTAHAEIMALRQGGLVMQNYRLYDATLYVTFEPCVMCAGAMIHSRIGRVVFGVRNAKTGAAGSLMDVLHYPGMNHRVEITEGILADECAALLCRFFRMPRRVFNAQKKAQSSTDSGGSSGGSSGSETPGTSESATPESSGGSSGGSDKKYSIGLAIGTNSVGWAVITDEYKVPSKKFKVLGNTDRHSIKKNLIGALLFDSGETAEATRLKRTARRRYTRRKNRICYLQEIFSNEMAKVDDSFFHRLEESFLVEEDKKHERHPIFGNIVDEVAYHEKYPTIYHLRKKLVDSTDKADLRLIYLALAHMIKFRGHFLIEGDLNPDNSDVDKLFIQLVQTYNQLFEENPINASGVDAKAILSARLSKSRRLENLIAQLPGEKKNGLFGNLIALSLGLTPNFKSNFDLAEDAKLQLSKDTYDDDLDNLLAQIGDQYADLFLAAKNLSDAILLSDILRVNTEITKAPLSASMIKRYDEHHQDLTLLKALVRQQLPEKYKEIFFDQSKNGYAGYIDGGASQEEFYKFIKPILEKMDGTEELLVKLNREDLLRKQRTFDNGSIPHQIHLGELHAILRRQEDFYPFLKDNREKIEKILTFRIPYYVGPLARGNSRFAWMTRKSEETITPWNFEEVVDKGASAQSFIERMTNFDKNLPNEKVLPKHSLLYEYFTVYNELTKVKYVTEGMRKPAFLSGEQKKAIVDLLFKTNRKVTVKQLKEDYFKKIECFDSVEISGVEDRFNASLGTYHDLLKIIKDKDFLDNEENEDILEDIVLTLTLFEDREMIEERLKTYAHLFDDKVMKQLKRRRYTGWGRLSRKLINGIRDKQSGKTILDFLKSDGFANRNFMQLIHDDSLTFKEDIQKAQVSGQGDSLHEHIANLAGSPAIKKGILQTVKVVDELVKVMGRHKPENIVIEMARENQTTQKGQKNSRERMKRIEEGIKELGSQILKEHPVENTQLQNEKLYLYYLQNGRDMYVDQELDINRLSDYDVDHIVPQSFLKDDSIDNKVLTRSDKNRGKSDNVPSEEVVKKMKNYWRQLLNAKLITQRKFDNLTKAERGGLSELDKAGFIKRQLVETRQITKHVAQILDSRMNTKYDENDKLIREVKVITLKSKLVSDFRKDFQFYKVREINNYHHAHDAYLNAVVGTALIKKYPKLESEFVYGDYKVYDVRKMIAKSEQEIGKATAKYFFYSNIMNFFKTEITLANGEIRKRPLIETNGETGEIVWDKGRDFATVRKVLSMPQVNIVKKTEVQTGGFSKESILPKRNSDKLIARKKDWDPKKYGGFVSPTVAYSVLVVAKVEKGKSKKLKSVKELLGITIMERSSFEKNPIDFLEAKGYKEVKKDLIIKLPKYSLFELENGRKRMLASARELQKGNELALPSKYVNFLYLASHYEKLKGSPEDNEQKQLFVEQHKHYLDEIIEQISEFSKRVILADANLDKVLSAYNKHRDKPIREQAENIIHLFTLTNLGAPAAFKYFDTTIDRKQYRSTKEVLDATLIHQSITGLYETRIDLSQLGGDEGADKRTADGSEFESPKKKRKV

SEQ ID NO: 257 - protein, 1588 aa, Artificial Sequence
  Description of Artificial Sequence: Synthetic polypeptide
MSEVEFSHEYWMRHALTLAKRARDEREVPVGAVLVLNNRVIGEGWNRAIGLHDPTAHAEIMALRQGGLVMQNYRLIDATLYVTFEPCVMCAGAMIHSRIGRVVFGVRNAKTGAAGSLMDVLHYPGMNHRVEITEGILADECAALLCRFFRMPRRVFNAQKKAQSSRDSGGSSGGSSGSETPGTSESATPESSGGSSGGSDKKYSIGLAIGTNSVGWAVITDEYKVPSKKFKVLGNTDRHSIKKNLIGALLFDSGETAEATRLKRTARRRYTRRKNRICYLQEIFSNEMAKVDDSFFHRLEESFLVEEDKKHERHPIFGNIVDEVAYHEKYPTIYHLRKKLVDSTDKADLRLIYLALAHMIKFRGHFLIEGDLNPDNSDVDKLFIQLVQTYNQLFEENPINASGVDAKAILSARLSKSRRLENLIAQLPGEKKNGLFGNLIALSLGLTPNFKSNFDLAEDAKLQLSKDTYDDDLDNLLAQIGDQYADLFLAAKNLSDAILLSDILRVNTEITKAPLSASMIKRYDEHHQDLTLLKALVRQQLPEKYKEIFFDQSKNGYAGYIDGGASQEEFYKFIKPILEKMDGTEELLVKLNREDLLRKQRTFDNGSIPHQIHLGELHAILRRQEDFYPFLKDNREKIEKILTFRIPYYVGPLARGNSRFAWMTRKSEETITPWNFEEVVDKGASAQSFIERMTNFDKNLPNEKVLPKHSLLYEYFTVYNELTKVKYVTEGMRKPAFLSGEQKKAIVDLLFKTNRKVTVKQLKEDYFKKIECFDSVEISGVEDRFNASLGTYHDLLKIIKDKDFLDNEENEDILEDIVLTLTLFEDREMIEERLKTYAHLFDDKVMKQLKRRRYTGWGRLSRKLINGIRDKQSGKTILDFLKSDGFANRNFMQLIHDDSLTFKEDIQKAQVSGQGDSLHEHIANLAGSPAIKKGILQTVKVVDELVKVMGRHKPENIVIEMARENQTTQKGQKNSRERMKRIEEGIKELGSQILKEHPVENTQLQNEKLYLYYLQNGRDMYVDQELDINRLSDYDVDHIVPQSFLKDDSIDNKVLTRSDKNRGKSDNVPSEEVVKKMKNYWRQLLNAKLITQRKFDNLTKAERGGLSELDKAGFIKRQLVETRQITKHVAQILDSRMNTKYDENDKLIREVKVITLKSKLVSDFRKDFQFYKVREINNYHHAHDAYLNAVVGTALIKKYPKLESEFVYGDYKVYDVRKMIAKSEQEIGKATAKYFFYSNIMNFFKTEITLANGEIRKRPLIETNGETGEIVWDKGRDFATVRKVLSMPQVNIVKKTEVQTGGFSKESILPKRNSDKLIARKKDWDPKKYGGFVSPTVAYSVLVVAKVEKGKSKKLKSVKELLGITIMERSSFEKNPIDFLEAKGYKEVKKDLIIKLPKYSLFELENGRKRMLASARELQKGNELALPSKYVNFLYLASHYEKLKGSPEDNEQKQLFVEQHKHYLDEIIEQISEFSKRVILADANLDKVLSAYNKHRDKPIREQAENIIHLFTLTNLGAPAAFKYFDTTIDRKQYRSTKEVLDATLIHQSITGLYETRIDLSQLGGDEGADKRTADGSEFESPKKKRKV

SEQ ID NO: 258 - protein, 1588 aa, Artificial Sequence
  Description of Artificial Sequence: Synthetic polypeptide
MSEVEFSHEYWMRHALTLAKRARDEREVPVGAVLVLNNRVIGEGWNRAIGLHDPTAHAEIMALRQGGLVMQNYRLIDATLYVTFEPCVMCAGAMIHSRIGRVVFGVRNAKTGAAGSLMDVLHYPGMNHRVEITEGILADECAALLCTFFRMPRRVFNAQKKAQSSTDSGGSSGGSSGSETPGTSESATPESSGGSSGGSDKKYSIGLAIGTNSVGWAVITDEYKVPSKKFKVLGNTDRHSIKKNLIGALLFDSGETAEATRLKRTARRRYTRRKNRICYLQEIFSNEMAKVDDSFFHRLEESFLVEEDKKHERHPIFGNIVDEVAYHEKYPTIYHLRKKLVDSTDKADLRLIYLALAHMIKFRGHFLIEGDLNPDNSDVDKLFIQLVQTYNQLFEENPINASGVDAKAILSARLSKSRRLENLIAQLPGEKKNGLFGNLIALSLGLTPNFKSNFDLAEDAKLQLSKDTYDDDLDNLLAQIGDQYADLFLAAKNLSDAILLSDILRVNTEITKAPLSASMIKRYDEHHQDLTLLKALVRQQLPEKYKEIFFDQSKNGYAGYIDGGASQEEFYKFIKPILEKMDGTEELLVKLNREDLLRKQRTFDNGSIPHQIHLGELHAILRRQEDFYPFLKDNREKIEKILTFRIPYYVGPLARGNSRFAWMTRKSEETITPWNFEEVVDKGASAQSFIERMTNFDKNLPNEKVLPKHSLLYEYFTVYNELTKVKYVTEGMRKPAFLSGEQKKAIVDLLFKTNRKVTVKQLKEDYFKKIECFDSVEISGVEDRFNASLGTYHDLLKIIKDKDFLDNEENEDILEDIVLTLTLFEDREMIEERLKTYAHLFDDKVMKQLKRRRYTGWGRLSRKLINGIRDKQSGKTILDFLKSDGFANRNFMQLIHDDSLTFKEDIQKAQVSGQGDSLHEHIANLAGSPAIKKGILQTVKVVDELVKVMGRHKPENIVIEMARENQTTQKGQKNSRERMKRIEEGIKELGSQILKEHPVENTQLQNEKLYLYYLQNGRDMYVDQELDINRLSDYDVDHIVPQSFLKDDSIDNKVLTRSDKNRGKSDNVPSEEVVKKMKNYWRQLLNAKLITQRKFDNLTKAERGGLSELDKAGFIKRQLVETRQITKHVAQILDSRMNTKYDENDKLIREVKVITLKSKLVSDFRKDFQFYKVREINNYHHAHDAYLNAVVGTALIKKYPKLESEFVYGDYKVYDVRKMIAKSEQEIGKATAKYFFYSNIMNFFKTEITLANGEIRKRPLIETNGETGEIVWDKGRDFATVRKVLSMPQVNIVKKTEVQTGGFSKESILPKRNSDKLIARKKDWDPKKYGGFVSPTVAYSVLVVAKVEKGKSKKLKSVKELLGITIMERSSFEKNPIDFLEAKGYKEVKKDLIIKLPKYSLFELENGRKRMLASARELQKGNELALPSKYVNFLYLASHYEKLKGSPEDNEQKQLFVEQHKHYLDEIIEQISEFSKRVILADANLDKVLSAYNKHRDKPIREQAENIIHLFTLTNLGAPAAFKYFDTTIDRKQYRSTKEVLDATLIHQSITGLYETRIDLSQLGGDEGADKRTADGSEFESPKKKRKV

SEQ ID NO: 259 - protein, 1588 aa, Artificial Sequence
  Description of Artificial Sequence: Synthetic polypeptide
MSEVEFSHEYWMRHALTLAKRARDEREVPVGAVLVLNNRVIGEGWNRAIGLHDPTAHAEIMALRQGGLVMQNYRLIDATLYVTFEPCVMCAGAMIHSRIGRVVFGVRNAKTGAAGSLMDVLHYPGMNHRVEITEGILADECAALLCTFFRMPRSVFNAQKKAQSSTDSGGSSGGSSGSETPGTSESATPESSGGSSGGSDKKYSIGLAIGTNSVGWAVITDEYKVPSKKFKVLGNTDRHSIKKNLIGALLFDSGETAEATRLKRTARRRYTRRKNRICYLQEIFSNEMAKVDDSFFHRLEESFLVEEDKKHERHPIFGNIVDEVAYHEKYPTIYHLRKKLVDSTDKADLRLIYLALAHMIKFRGHFLIEGDLNPDNSDVDKLFIQLVQTYNQLFEENPINASGVDAKAILSARLSKSRRLENLIAQLPGEKKNGLFGNLIALSLGLTPNFKSNFDLAEDAKLQLSKDTYDDDLDNLLAQIGDQYADLFLAAKNLSDAILLSDILRVNTEITKAPLSASMIKRYDEHHQDLTLLKALVRQQLPEKYKEIFFDQSKNGYAGYIDGGASQEEFYKFIKPILEKMDGTEELLVKLNREDLLRKQRTFDNGSIPHQIHLGELHAILRRQEDFYPFLKDNREKIEKILTFRIPYYVGPLARGNSRFAWMTRKSEETITPWNFEEVVDKGASAQSFIERMTNFDKNLPNEKVLPKHSLLYEYFTVYNELTKVKYVTEGMRKPAFLSGEQKKAIVDLLFKTNRKVTVKQLKEDYFKKIECFDSVEISGVEDRFNASLGTYHDLLKIIKDKDFLDNEENEDILEDIVLTLTLFEDREMIEERLKTYAHLFDDKVMKQLKRRRYTGWGRLSRKLINGIRDKQSGKTILDFLKSDGFANRNFMQLIHDDSLTFKEDIQKAQVSGQGDSLHEHIANLAGSPAIKKGILQTVKVVDELVKVMGRHKPENIVIEMARENQTTQKGQKNSRERMKRIEEGIKELGSQILKEHPVENTQLQNEKLYLYYLQNGRDMYVDQELDINRLSDYDVDHIVPQSFLKDDSIDNKVLTRSDKNRGKSDNVPSEEVVKKMKNYWRQLLNAKLITQRKFDNLTKAERGGLSELDKAGFIKRQLVETRQITKHVAQILDSRMNTKYDENDKLIREVKVITLKSKLVSDFRKDFQFYKVREINNYHHAHDAYLNAVVGTALIKKYPKLESEFVYGDYKVYDVRKMIAKSEQEIGKATAKYFFYSNIMNFFKTEITLANGEIRKRPLIETNGETGEIVWDKGRDFATVRKVLSMPQVNIVKKTEVQTGGFSKESILPKRNSDKLIARKKDWDPKKYGGFVSPTVAYSVLVVAKVEKGKSKKLKSVKELLGITIMERSSFEKNPIDFLEAKGYKEVKKDLIIKLPKYSLFELENGRKRMLASARELQKGNELALPSKYVNFLYLASHYEKLKGSPEDNEQKQLFVEQHKHYLDEIIEQISEFSKRVILADANLDKVLSAYNKHRDKPIREQAENIIHLFTLTNLGAPAAFKYFDTTIDRKQYRSTKEVLDATLIHQSITGLYETRIDLSQLGGDEGADKRTADGSEFESPKKKRKV

SEQ ID NO: 260 - protein, 1588 aa, Artificial Sequence
  Description of Artificial Sequence: Synthetic polypeptide
MSEVEFSHEYWMRHALTLAKRARDEREVPVGAVLVLNNRVIGEGWNRAIGLHDPTAHAEIMALRQGGLVMQNYRLYDATLYVTFEPCVMCAGAMIHSRIGRVVFGVRNAKTGAAGSLMDVLHHPGMNHRVEITEGILADECAALLCRFFRMPRRVFNAQKKAQSSTDSGGSSGGSSGSETPGTSESATPESSGGSSGGSDKKYSIGLAIGTNSVGWAVITDEYKVPSKKFKVLGNTDRHSIKKNLIGALLFDSGETAEATRLKRTARRRYTRRKNRICYLQEIFSNEMAKVDDSFFHRLEESFLVEEDKKHERHPIFGNIVDEVAYHEKYPTIYHLRKKLVDSTDKADLRLIYLALAHMIKFRGHFLIEGDLNPDNSDVDKLFIQLVQTYNQLFEENPINASGVDAKAILSARLSKSRRLENLIAQLPGEKKNGLFGNLIALSLGLTPNFKSNFDLAEDAKLQLSKDTYDDDLDNLLAQIGDQYADLFLAAKNLSDAILLSDILRVNTEITKAPLSASMIKRYDEHHQDLTLLKALVRQQLPEKYKEIFFDQSKNGYAGYIDGGASQEEFYKFIKPILEKMDGTEELLVKLNREDLLRKQRTFDNGSIPHQIHLGELHAILRRQEDFYPFLKDNREKIEKILTFRIPYYVGPLARGNSRFAWMTRKSEETITPWNFEEVVDKGASAQSFIERMTNFDKNLPNEKVLPKHSLLYEYFTVYNELTKVKYVTEGMRKPAFLSGEQKKAIVDLLFKTNRKVTVKQLKEDYFKKIECFDSVEISGVEDRFNASLGTYHDLLKIIKDKDFLDNEENEDILEDIVLTLTLFEDREMIEERLKTYAHLFDDKVMKQLKRRRYTGWGRLSRKLINGIRDKQSGKTILDFLKSDGFANRNFMQLIHDDSLTFKEDIQKAQVSGQGDSLHEHIANLAGSPAIKKGILQTVKVVDELVKVMGRHKPENIVIEMARENQTTQKGQKNSRERMKRIEEGIKELGSQILKEHPVENTQLQNEKLYLYYLQNGRDMYVDQELDINRLSDYDVDHIVPQSFLKDDSIDNKVLTRSDKNRGKSDNVPSEEVVKKMKNYWRQLLNAKLITQRKFDNLTKAERGGLSELDKAGFIKRQLVETRQITKHVAQILDSRMNTKYDENDKLIREVKVITLKSKLVSDFRKDFQFYKVREINNYHHAHDAYLNAVVGTALIKKYPKLESEFVYGDYKVYDVRKMIAKSEQEIGKATAKYFFYSNIMNFFKTEITLANGEIRKRPLIETNGETGEIVWDKGRDFATVRKVLSMPQVNIVKKTEVQTGGFSKESILPKRNSDKLIARKKDWDPKKYGGFVSPTVAYSVLVVAKVEKGKSKKLKSVKELLGITIMERSSFEKNPIDFLEAKGYKEVKKDLIIKLPKYSLFELENGRKRMLASARELQKGNELALPSKYVNFLYLASHYEKLKGSPEDNEQKQLFVEQHKHYLDEIIEQISEFSKRVILADANLDKVLSAYNKHRDKPIREQAENIIHLFTLTNLGAPAAFKYFDTTIDRKQYRSTKEVLDATLIHQSITGLYETRIDLSQLGGDEGADKRTADGSEFESPKKKRKV

SEQ ID NO: 261 - protein, 1588 aa, Artificial Sequence
  Description of Artificial Sequence: Synthetic polypeptide
MSEVEFSHEYWMRHALTLAKRARDEREVPVGAVLVLNNRVIGEGWNRAIGLHDPTAHAEIMALRQGGLVMQNYRLIDATLYSTFEPCVMCAGAMIHSRIGRVVFGVRNAKTGAAGSLMDVLHYPGMNHRVEITEGILADECAALLCYFFRMPRRVFNAQKKAQSSTDSGGSSGGSSGSETPGTSESATPESSGGSSGGSDKKYSIGLAIGTNSVGWAVITDEYKVPSKKFKVLGNTDRHSIKKNLIGALLFDSGETAEATRLKRTARRRYTRRKNRICYLQEIFSNEMAKVDDSFFHRLEESFLVEEDKKHERHPIFGNIVDEVAYHEKYPTIYHLRKKLVDSTDKADLRLIYLALAHMIKFRGHFLIEGDLNPDNSDVDKLFIQLVQTYNQLFEENPINASGVDAKAILSARLSKSRRLENLIAQLPGEKKNGLFGNLIALSLGLTPNFKSNFDLAEDAKLQLSKDTYDDDLDNLLAQIGDQYADLFLAAKNLSDAILLSDILRVNTEITKAPLSASMIKRYDEHHQDLTLLKALVRQQLPEKYKEIFFDQSKNGYAGYIDGGASQEEFYKFIKPILEKMDGTEELLVKLNREDLLRKQRTFDNGSIPHQIHLGELHAILRRQEDFYPFLKDNREKIEKILTFRIPYYVGPLARGNSRFAWMTRKSEETITPWNFEEVVDKGASAQSFIERMTNFDKNLPNEKVLPKHSLLYEYFTVYNELTKVKYVTEGMRKPAFLSGEQKKAIVDLLFKTNRKVTVKQLKEDYFKKIECFDSVEISGVEDRFNASLGTYHDLLKIIKDKDFLDNEENEDILEDIVLTLTLFEDREMIEERLKTYAHLFDDKVMKQLKRRRYTGWGRLSRKLINGIRDKQSGKTILDFLKSDGFANRNFMQLIHDDSLTFKEDIQKAQVSGQGDSLHEHIANLAGSPAIKKGILQTVKVVDELVKVMGRHKPENIVIEMARENQTTQKGQKNSRERMKRIEEGIKELGSQILKEHPVENTQLQNEKLYLYYLQNGRDMYVDQELDINRLSDYDVDHIVPQSFLKDDSIDNKVLTRSDKNRGKSDNVPSEEVVKKMKNYWRQLLNAKLITQRKFDNLTKAERGGLSELDKAGFIKRQLVETRQITKHVAQILDSRMNTKYDENDKLIREVKVITLKSKLVSDFRKDFQFYKVREINNYHHAHDAYLNAVVGTALIKKYPKLESEFVYGDYKVYDVRKMIAKSEQEIGKATAKYFFYSNIMNFFKTEITLANGEIRKRPLIETNGETGEIVWDKGRDFATVRKVLSMPQVNIVKKTEVQTGGFSKESILPKRNSDKLIARKKDWDPKKYGGFVSPTVAYSVLVVAKVEKGKSKKLKSVKELLGITIMERSSFEKNPIDFLEAKGYKEVKKDLIIKLPKYSLFELENGRKRMLASARELQKGNELALPSKYVNFLYLASHYEKLKGSPEDNEQKQLFVEQHKHYLDEIIEQISEFSKRVILADANLDKVLSAYNKHRDKPIREQAENIIHLFTLTNLGAPAAFKYFDTTIDRKQYRSTKEVLDATLIHQSITGLYETRIDLSQLGGDEGADKRTADGSEFESPKKKRKV

SEQ ID NO: 262 - protein, 4 aa, Artificial Sequence
  Description of Artificial Sequence: Synthetic peptide
SGGS

SEQ ID NO: 263 - protein, 4 aa, Artificial Sequence
  Description of Artificial Sequence: Synthetic peptide
GGGS

SEQ ID NO: 264 - protein, 5 aa, Artificial Sequence
  Description of Artificial Sequence: Synthetic peptide
GGGGS

SEQ ID NO: 265 - protein, 5 aa, Artificial Sequence
  Description of Artificial Sequence: Synthetic peptide
EAAAK

SEQ ID NO: 266 - protein, 21 aa, Artificial Sequence
  Description of Artificial Sequence: Synthetic peptide
  MISC_FEATURE (1)..(21): This sequence may encompass 1, 3 or 7 "Gly Gly Ser" repeating units
GGSGGSGGSGGSGGSGGSGGS

SEQ ID NO: 267 - protein, 5 aa, Artificial Sequence
  Description of Artificial Sequence: Synthetic peptide
PAPAP

SEQ ID NO: 268 - protein, 6 aa, Artificial Sequence
  Description of Artificial Sequence: Synthetic peptide
PAPAPA

SEQ ID NO: 269 - protein, 7 aa, Artificial Sequence
  Description of Artificial Sequence: Synthetic peptide
PAPAPAP

SEQ ID NO: 270 - protein, 8 aa, Artificial Sequence
  Description of Artificial Sequence: Synthetic peptide
PAPAPAPA

SEQ ID NO: 271 - protein, 9 aa, Artificial Sequence
  Description of Artificial Sequence: Synthetic peptide
PAPAPAPAP

SEQ ID NO: 272 - protein, 15 aa, Artificial Sequence
  Description of Artificial Sequence: Synthetic peptide
PAPAPAPAPAPAPAP

SEQ ID NO: 273 - protein, 21 aa, Artificial Sequence
  Description of Artificial Sequence: Synthetic peptide
PAPAPAPAPAPAPAPAPAPAP

SEQ ID NO: 274 - DNA, 933 bp, Unknown
  Description of Unknown: inactivated kanamycin resistance gene sequence
ccggaattgccagctggggcgccctctggtaaggttgggaagccctgcaaagtaaactggatggctttcttgccgccaaggatctgatggcgcaggggatcaagatctgatcaagagacaggatgaggatcctttcgcatgatcgaataagatggattgcacgcaggttctccggccgcttaggtggagcgcctattcggctatgactgggcacaacagacaatcggctgctctgatgccgccgtgttccggctgtcagcgcaggggcgcccggttctttttgtcaagaccgacctgtccggtgccctgaatgaactgcaggacgaggcagcgcggctatcgtggctggccacgacgggcgttccttgcgcagctgtgctcgacgttgtcactgaagcgggaagggactggctgctattgggcgaagtgccggggcaggatctcctgtcatctcaccttgctcctgccgagaaagtatccatcatggctgatgcaatgcggcggctgcatacgcttgatccggctacctgcccattcgaccaccaagcgaaacatcgcatcgagcgagcacgtactcggatggaagccggtcttgtcgatcaggatgatctggacgaagagcatcaggggctcgcgccagccgaactgttcgccaggctcaaggcgcgcatgcccgacggcgaggatctcgtcgtgacccatggcgatgcctgcttgccgaatatcatggtggaaaatggccgcttttctggattcattaactgtggccggctgggtgtggcggaccgctatcaggacatagcgttggctacccgtgatattgctgaagagcttggcggcgaatgggctgaccgcttcctcgtgctttacggtatcgccgctcccgattcgcagcgcatcgccttctatcgccttcttgacgagttcttctaa

SEQ ID NO: 275 - RNA, 20 nt, Artificial Sequence
  Description of Artificial Sequence: Synthetic oligonucleotide
gaacacaaagcauagacugc

SEQ ID NO: 276 - RNA, 20 nt, Artificial Sequence
  Description of Artificial Sequence: Synthetic oligonucleotide
gggaaagacccagcauccgu

SEQ ID NO: 277 - RNA, 20 nt, Artificial Sequence
  Description of Artificial Sequence: Synthetic oligonucleotide
gcucccaucacaucaaccgg

SEQ ID NO: 278 - RNA, 20 nt, Artificial Sequence
  Description of Artificial Sequence: Synthetic oligonucleotide
ggugagugagugugugcgug

SEQ ID NO: 279 - RNA, 20 nt, Artificial Sequence
  Description of Artificial Sequence: Synthetic oligonucleotide
ggcuucagguucuaaaugag

SEQ ID NO: 280 - RNA, 20 nt, Artificial Sequence
  Description of Artificial Sequence: Synthetic oligonucleotide
gcagagagucgccgucucca

SEQ ID NO: 281 - RNA, 20 nt, Artificial Sequence
  Description of Artificial Sequence: Synthetic oligonucleotide
guguaagaccucaaaagcac

SEQ ID NO: 282 - RNA, 20 nt, Artificial Sequence
  Description of Artificial Sequence: Synthetic oligonucleotide
gaugagaaggagaaguucuu

SEQ ID NO: 283 - RNA, 20 nt, Artificial Sequence
  Description of Artificial Sequence: Synthetic oligonucleotide
gaggacaaaguacaaacggc

SEQ ID NO: 284 - RNA, 20 nt, Artificial Sequence
  Description of Artificial Sequence: Synthetic oligonucleotide
gccaccacagggaagcuggg

SEQ ID NO: 285 - RNA, 20 nt, Artificial Sequence
  Description of Artificial Sequence: Synthetic oligonucleotide
gcucucaggcccuguccgca

SEQ ID NO: 286 - RNA, 20 nt, Artificial Sequence
  Description of Artificial Sequence: Synthetic oligonucleotide
gagcaaauaccagagauaag

SEQ ID NO: 287 - RNA, 20 nt, Artificial Sequence
  Description of Artificial Sequence: Synthetic oligonucleotide
gaucaggaaauagagccaca

SEQ ID NO: 288 - RNA, 20 nt, Artificial Sequence
  Description of Artificial Sequence: Synthetic oligonucleotide
gcccaucccugaguccagcg

SEQ ID NO: 289 - RNA, 23 nt, Artificial Sequence
  Description of Artificial Sequence: Synthetic oligonucleotide
gaacacgaagacaucugaaggua

SEQ ID NO: 290 - RNA, 23 nt, Artificial Sequence
  Description of Artificial Sequence: Synthetic oligonucleotide
gauuuacagccuggccuuugggg

SEQ ID NO: 291 - RNA, 22 nt, Artificial Sequence
  Description of Artificial Sequence: Synthetic oligonucleotide
ggagagaaagagaaguugauug

SEQ ID NO: 292 - RNA, 22 nt, Artificial Sequence
  Description of Artificial Sequence: Synthetic oligonucleotide
gagggugagggaugagauaaug

SEQ ID NO: 293 - RNA, 22 nt, Artificial Sequence
  Description of Artificial Sequence: Synthetic oligonucleotide
gguggaggagggugcauggggu

SEQ ID NO: 294 - RNA, 22 nt, Artificial Sequence
  Description of Artificial Sequence: Synthetic oligonucleotide
gcuguugcaugaggaaagggac

SEQ ID NO: 295 - RNA, 20 nt, Artificial Sequence
  Description of Artificial Sequence: Synthetic oligonucleotide
ggcccagacugagcacguga

SEQ ID NO: 296 - RNA, 20 nt, Artificial Sequence
  Description of Artificial Sequence: Synthetic oligonucleotide
ggcacugcggcuggaggugg

SEQ ID NO: 297 - RNA, 21 nt, Artificial Sequence
  Description of Artificial Sequence: Synthetic oligonucleotide
gcagagcacuggaauucguca

SEQ ID NO: 298 - RNA, 76 nt, Artificial Sequence
  Description of Artificial Sequence: Synthetic oligonucleotide
guuuuagagcuagaaauagcaaguuaaaauaaggcuaguccguuaucaacuugaaaaaguggcaccgagucggugc

SEQ ID NO: 299 - RNA, 84 nt, Artificial Sequence
  Description of Artificial Sequence: Synthetic oligonucleotide
guuuuaguacucuguaaugaaaauuacagaaucuacuaaaacaaggcaaaaugccguguuuaucucgucaacuuguuggcgaga

SEQ ID NO: 300 - DNA, 57 bp, Artificial Sequence
  Description of Artificial Sequence: Synthetic primer
  modified_base (34)..(37): a, c, t, g, unknown or other
acactctttccctacacgacgctcttccgatctnnnnccagccccatctgtcaaact

SEQ ID NO: 301 - DNA, 54 bp, Artificial Sequence
  Description of Artificial Sequence: Synthetic primer
tggagttcagacgtgtgctcttccgatcttgaatggattccttggaaacaatga

SEQ ID NO: 302 - DNA, 57 bp, Artificial Sequence
  Description of Artificial Sequence: Synthetic primer
  modified_base (34)..(37): a, c, t, g, unknown or other
acactctttccctacacgacgctcttccgatctnnnntgagggagagccgtgtagtt

SEQ ID NO: 303 - DNA, 49 bp, Artificial Sequence
  Description of Artificial Sequence: Synthetic primer
tggagttcagacgtgtgctcttccgatctgcctctcaaagtgctgggat

SEQ ID NO: 304 - DNA, 57 bp, Artificial Sequence
  Description of Artificial Sequence: Synthetic primer
  modified_base (34)..(37): a, c, t, g, unknown or other
acactctttccctacacgacgctcttccgatctnnnnccatcaggctctcagctcag

SEQ ID NO: 305 - DNA, 48 bp, Artificial Sequence
  Description of Artificial Sequence: Synthetic primer
tggagttcagacgtgtgctcttccgatctctcgtgggtttgtggttgc

SEQ ID NO: 306 - DNA, 57 bp, Artificial Sequence
  Description of Artificial Sequence: Synthetic primer
  modified_base (34)..(37): a, c, t, g, unknown or other
acactctttccctacacgacgctcttccgatctnnnngcccattccctctttagcca

SEQ ID NO: 307 - DNA, 49 bp, Artificial Sequence
  Description of Artificial Sequence: Synthetic primer
tggagttcagacgtgtgctcttccgatctgagccgttccctctttgcta

SEQ ID NO: 308 - DNA, 57 bp, Artificial Sequence
  Description of Artificial Sequence: Synthetic primer
  modified_base (34)..(37): a, c, t, g, unknown or other
acactctttccctacacgacgctcttccgatctnnnnaacctgtgtgacacttggca

SEQ ID NO: 309 - DNA, 49 bp, Artificial Sequence
  Description of Artificial Sequence: Synthetic primer
tggagttcagacgtgtgctcttccgatctgtctggcccaagatcacaca

SEQ ID NO: 310 - DNA, 56 bp, Artificial Sequence
  Description of Artificial Sequence: Synthetic primer
  modified_base (34)..(36): a, c, t, g, unknown or other
acactctttccctacacgacgctcttccgatctnnncacggataaagacgctggga

SEQ ID NO: 311 - DNA, 47 bp, Artificial Sequence
  Description of Artificial Sequence: Synthetic primer
tggagttcagacgtgtgctcttccgatctggggtcccaggtgctgac

SEQ ID NO: 312 - DNA, 56 bp, Artificial Sequence
  Description of Artificial Sequence: Synthetic primer
  modified_base (34)..(36): a, c, t, g, unknown or other
acactctttccctacacgacgctcttccgatctnnnttgattgtctcctttgccgc

SEQ ID NO: 313 - DNA, 53 bp, Artificial Sequence
  Description of Artificial Sequence: Synthetic primer
tggagttcagacgtgtgctcttccgatcttgacccagtgtttgatagatcagt

SEQ ID NO: 314 - DNA, 56 bp, Artificial Sequence
  Description of Artificial Sequence: Synthetic primer
  modified_base (34)..(36): a, c, t, g, unknown or other
acactctttccctacacgacgctcttccgatctnnncaccccttcagtccatgctt

SEQ ID NO: 315 - DNA, 49 bp, Artificial Sequence
  Description of Artificial Sequence: Synthetic primer
tggagttcagacgtgtgctcttccgatcttctgatggggaggaacgagt

SEQ ID NO: 316 - DNA, 57 bp, Artificial Sequence
  Description of Artificial Sequence: Synthetic primer
  modified_base (34)..(37): a, c, t, g, unknown or other
acactctttccctacacgacgctcttccgatctnnnncagctcagcctgagtgttga

SEQ ID NO: 317 - DNA, 49 bp, Artificial Sequence
  Description of Artificial Sequence: Synthetic primer
tggagttcagacgtgtgctcttccgatctgcccaccctagtcattggag

SEQ ID NO: 318 - DNA, 57 bp, Artificial Sequence
  Description of Artificial Sequence: Synthetic primer
  modified_base (34)..(37): a, c, t, g, unknown or other
acactctttccctacacgacgctcttccgatctnnnngtcagagggacacactgtgg

SEQ ID NO: 319 - DNA, 49 bp, Artificial Sequence
  Description of Artificial Sequence: Synthetic primer
tggagttcagacgtgtgctcttccgatctcacactcactcacccacaca

SEQ ID NO: 320 - DNA, 57 bp, Artificial Sequence
  Description of Artificial Sequence: Synthetic primer
  modified_base (34)..(37): a, c, t, g, unknown or other
acactctttccctacacgacgctcttccgatctnnnntgtgtgggtgagtgagtgtg

SEQ ID NO: 321 - DNA, 49 bp, Artificial Sequence
  Description of Artificial Sequence: Synthetic primer
tggagttcagacgtgtgctcttccgatctcaccaaggttcacagcctga

SEQ ID NO: 322 - DNA, 57 bp, Artificial Sequence
  Description of Artificial Sequence: Synthetic primer
  modified_base (34)..(37): a, c, t, g, unknown or other
acactctttccctacacgacgctcttccgatctnnnnttgtctctgcctgtagctgc

SEQ ID NO: 323 - DNA, 49 bp, Artificial Sequence
  Description of Artificial Sequence: Synthetic primer
tggagttcagacgtgtgctcttccgatctcgctctgggcttcatcttca

SEQ ID NO: 324 - DNA, 57 bp, Artificial Sequence
  Description of Artificial Sequence: Synthetic primer
  modified_base (34)..(37): a, c, t, g, unknown or other
acactctttccctacacgacgctcttccgatctnnnntgggattatgggtgtgagcc

SEQ ID NO: 325 - DNA, 49 bp, Artificial Sequence
  Description of Artificial Sequence: Synthetic primer
tggagttcagacgtgtgctcttccgatcttgccttcctcctctctctcc

SEQ ID NO: 326 - DNA, 57 bp, Artificial Sequence
  Description of Artificial Sequence: Synthetic primer
  modified_base (34)..(37): a, c, t, g, unknown or other
acactctttccctacacgacgctcttccgatctnnnntgcagaccagattcggagaa

SEQ ID NO: 327 - DNA, 49 bp, Artificial Sequence
  Description of Artificial Sequence: Synthetic primer
tggagttcagacgtgtgctcttccgatctgttcagtttccagggggtcc

SEQ ID NO: 328 - DNA, 57 bp, Artificial Sequence
  Description of Artificial Sequence: Synthetic primer
  modified_base (34)..(37): a, c, t, g, unknown or other
acactctttccctacacgacgctcttccgatctnnnntccgcacagccttagttcaa

SEQ ID NO: 329 - DNA, 49 bp, Artificial Sequence
  Description of Artificial Sequence: Synthetic primer
tggagttcagacgtgtgctcttccgatctaacttgaagagacggcagca

SEQ ID NO: 330 - DNA, 57 bp, Artificial Sequence
  Description of Artificial Sequence: Synthetic primer
  modified_base (34)..(37): a, c, t, g, unknown or other
acactctttccctacacgacgctcttccgatctnnnncccccagctacagaaaggtc

SEQ ID NO: 331 - DNA, 49 bp, Artificial Sequence
  Description of Artificial Sequence: Synthetic primer
tggagttcagacgtgtgctcttccgatctatttccaccgcaaaatggcc

SEQ ID NO: 332 - DNA, 57 bp, Artificial Sequence
  Description of Artificial Sequence: Synthetic primer
  modified_base (34)..(37): a, c, t, g, unknown or other
acactctttccctacacgacgctcttccgatctnnnntcacttcagcccaggagtat

SEQ ID NO: 333 - DNA, 51 bp, Artificial Sequence
  Description of Artificial Sequence: Synthetic primer
tggagttcagacgtgtgctcttccgatcttgtgtatggtgagaggtaggga

SEQ ID NO: 334 - DNA, 57 bp, Artificial Sequence
  Description of Artificial Sequence: Synthetic primer
  modified_base (34)..(37): a, c, t, g, unknown or other
acactctttccctacacgacgctcttccgatctnnnngtctgaggtcacacagtggg

SEQ ID NO: 335 - DNA, 49 bp, Artificial Sequence
  Description of Artificial Sequence: Synthetic primer
tggagttcagacgtgtgctcttccgatctctgagagcagggaccacatc

SEQ ID NO: 336 - DNA, 57 bp, Artificial Sequence
  Description of Artificial Sequence: Synthetic primer
  modified_base (34)..(37): a, c, t, g, unknown or other
acactctttccctacacgacgctcttccgatctnnnngggaggtggagagaggatgt

SEQ ID NO: 337 - DNA, 54 bp, Artificial Sequence
  Description of Artificial Sequence: Synthetic primer
tggagttcagacgtgtgctcttccgatctactcttcctgaggtctaggaacccg

SEQ ID NO: 338 - DNA, 57 bp, Artificial Sequence
  Description of Artificial Sequence: Synthetic primer
  modified_base (34)..(37): a, c, t, g, unknown or other
acactctttccctacacgacgctcttccgatctnnnnccctgttcctaaagcccacc

SEQ ID NO: 339 - DNA, 53 bp, Artificial Sequence
  Description of Artificial Sequence: Synthetic primer
tggagttcagacgtgtgctcttccgatctactctctggttctgtttgtggcca

SEQ ID NO: 340 - DNA, 60 bp, Artificial Sequence
  Description of Artificial Sequence: Synthetic primer
  modified_base (34)..(37): a, c, t, g, unknown or other
acactctttccctacacgacgctcttccgatctnnnnatttgatggagttggacatggcc

SEQ ID NO: 341 - DNA, 46 bp, Artificial Sequence
  Description of Artificial Sequence: Synthetic primer
tggagttcagacgtgtgctctccagctacttgttcttgagtgaagg

SEQ ID NO: 342 - DNA, 59 bp, Artificial Sequence
  Description of Artificial Sequence: Synthetic primer
  modified_base (34)..(37): a, c, t, g, unknown or other
acactctttccctacacgacgctcttccgatctnnnntggctttccaaatcagtgggtc

SEQ ID NO: 343 - DNA, 52 bp, Artificial Sequence
  Description of Artificial Sequence: Synthetic primer
tggagttcagacgtgtgctcttccgatctctcataagcttagaccaacaagc

SEQ ID NO: 344 - DNA, 58 bp, Artificial Sequence
  Description of Artificial Sequence: Synthetic primer
  modified_base (34)..(37): a, c, t, g, unknown or other
acactctttccctacacgacgctcttccgatctnnnnctggttgaccaatctgtggtg

SEQ ID NO: 345 - DNA, 41 bp, Artificial Sequence
  Description of Artificial Sequence: Synthetic primer
tggagttcagacgtgtgctctctgcgtctggatcaggtacg

SEQ ID NO: 346 - DNA, 58 bp, Artificial Sequence
  Description of Artificial Sequence: Synthetic primer
  modified_base (34)..(37): a, c, t, g, unknown or other
acactctttccctacacgacgctcttccgatctnnnngtgtggagagtgagtaagcca

SEQ ID NO: 347 - DNA, 50 bp, Artificial Sequence
  Description of Artificial Sequence: Synthetic primer
tggagttcagacgtgtgctcttccgatctacggtaggatgatttcaggca

SEQ ID NO: 348 - DNA, 58 bp, Artificial Sequence
  Description of Artificial Sequence: Synthetic primer
  modified_base (34)..(37): a, c, t, g, unknown or other
acactctttccctacacgacgctcttccgatctnnnncacaaagcagtgtagctcagg

SEQ ID NO: 349 - DNA, 54 bp, Artificial Sequence
  Description of Artificial Sequence: Synthetic primer
tggagttcagacgtgtgctcttccgatcttttttggtactcgagtgttattcag

SEQ ID NO: 350 - DNA, 57 bp, Artificial Sequence
  Description of Artificial Sequence: Synthetic primer
  modified_base (34)..(37): a, c, t, g, unknown or other
acactctttccctacacgacgctcttccgatctnnnntcccctgttgacctggagaa

SEQ ID NO: 351 - DNA, 49 bp, Artificial Sequence
  Description of Artificial Sequence: Synthetic primer
tggagttcagacgtgtgctcttccgatctcactgtacttgccctgacca

SEQ ID NO: 352 - DNA, 57 bp, Artificial Sequence
  Description of Artificial Sequence: Synthetic primer
  modified_base (34)..(37): a, c, t, g, unknown or other
acactctttccctacacgacgctcttccgatctnnnnttggtgttgacagggagcaa

SEQ ID NO: 353 - DNA, 49 bp, Artificial Sequence
  Description of Artificial Sequence: Synthetic primer
tggagttcagacgtgtgctcttccgatctctgagatgtgggcagaaggg

SEQ ID NO: 354 - DNA, 57 bp, Artificial Sequence
  Description of Artificial Sequence: Synthetic primer
  modified_base (34)..(37): a, c, t, g, unknown or other
acactctttccctacacgacgctcttccgatctnnnntgagagggaacagaagggct

SEQ ID NO: 355 - DNA, 49 bp, Artificial Sequence
  Description of Artificial Sequence: Synthetic primer
tggagttcagacgtgtgctcttccgatctgtccaaaggcccaagaacct

SEQ ID NO: 356 - DNA, 58 bp, Artificial Sequence
  Description of Artificial Sequence: Synthetic primer
  modified_base (34)..(37): a, c, t, g, unknown or other
acactctttccctacacgacgctcttccgatctnnnntcctagcactttggaaggtcg

SEQ ID NO: 357 - DNA, 51 bp, Artificial Sequence
  Description of Artificial Sequence: Synthetic primer
tggagttcagacgtgtgctcttccgatctgctcatcttaatctgctcagcc

SEQ ID NO: 358 - DNA, 57 bp, Artificial Sequence
  Description of Artificial Sequence: Synthetic primer
  modified_base (34)..(37): a, c, t, g, unknown or other
acactctttccctacacgacgctcttccgatctnnnnaaaggagcagctcttcctgg

SEQ ID NO: 359 - DNA, 49 bp, Artificial Sequence
  Description of Artificial Sequence: Synthetic primer
tggagttcagacgtgtgctcttccgatctgtctgcaccatctcccacaa

SEQ ID NO: 360 - DNA, 57 bp, Artificial Sequence
  Description of Artificial Sequence: Synthetic primer
  modified_base (34)..(37): a, c, t, g, unknown or other
acactctttccctacacgacgctcttccgatctnnnnggcatggcttctgagactca

SEQ ID NO: 361 - DNA, 53 bp, Artificial Sequence
  Description of Artificial Sequence: Synthetic primer
tggagttcagacgtgtgctcttccgatctgtctcccttgcactccctgtcttt

SEQ ID NO: 362 - DNA, 57 bp, Artificial Sequence
  Description of Artificial Sequence: Synthetic primer
  modified_base (34)..(37): a, c, t, g, unknown or other
acactctttccctacacgacgctcttccgatctnnnntttggcaatggaggcattgg

SEQ ID NO: 363 - DNA, 49 bp, Artificial Sequence
  Description of Artificial Sequence: Synthetic primer
tggagttcagacgtgtgctcttccgatctgaagaggctgcccatgagag

SEQ ID NO: 364 - DNA, 57 bp, Artificial Sequence
  Description of Artificial Sequence: Synthetic primer
  modified_base (34)..(37): a, c, t, g, unknown or other
acactctttccctacacgacgctcttccgatctnnnnggtctgaggctcgaatcctg

SEQ ID NO: 365 - DNA, 49 bp, Artificial Sequence
  Description of Artificial Sequence: Synthetic primer
tggagttcagacgtgtgctcttccgatctctgtggcctccatatccctg

SEQ ID NO: 366 - DNA, 57 bp, Artificial Sequence
  Description of Artificial Sequence: Synthetic primer
  modified_base (34)..(37): a, c, t, g, unknown or other
acactctttccctacacgacgctcttccgatctnnnntttccaccagaactcagccc

SEQ ID NO: 367 - DNA, 49 bp, Artificial Sequence
  Description of Artificial Sequence: Synthetic primer
tggagttcagacgtgtgctcttccgatctcctcggttcctccacaacac

SEQ ID NO: 368 - DNA, 57 bp, Artificial Sequence
  Description of Artificial Sequence: Synthetic primer
  modified_base (34)..(37): a, c, t, g, unknown or other
acactctttccctacacgacgctcttccgatctnnnncacgggaaggacaggagaag

SEQ ID NO: 369 - DNA, 49 bp, Artificial Sequence
  Description of Artificial Sequence: Synthetic primer
tggagttcagacgtgtgctcttccgatctgcaggggagggataaagcag

SEQ ID NO: 370 - DNA, 59 bp, Artificial Sequence
  Description of Artificial Sequence: Synthetic primer
  modified_base (34)..(37): a, c, t, g, unknown or other
acactctttccctacacgacgctcttccgatctnnnnggaaacgcccatgcaattagtc

SEQ ID NO: 371 - DNA, 51 bp, Artificial Sequence
  Description of Artificial Sequence: Synthetic primer
tggagttcagacgtgtgctcttccgatctcttgtcaaccagtatcccggtg

SEQ ID NO: 372 - DNA, 61 bp, Artificial Sequence
  Description of Artificial Sequence: Synthetic primer
  modified_base (34)..(37): a, c, t, g, unknown or other
acactctttccctacacgacgctcttccgatctnnnntgaatggattccttggaaacaatg

SEQ ID NO: 373 - DNA, 49 bp, Artificial Sequence
  Description of Artificial Sequence: Synthetic primer
tggagttcagacgtgtgctcttccgatctccagccccatctgtcaaact

SEQ ID NO: 374 - DNA, 49 bp, Artificial Sequence
  Description of Artificial Sequence: Synthetic primer
tggagttcagacgtgtgctcttccgatcttcctttcaacccgaacggag

SEQ ID NO: 375 - DNA, 57 bp, Artificial Sequence
  Description of Artificial Sequence: Synthetic primer
  modified_base (34)..(37): a, c, t, g, unknown or other
acactctttccctacacgacgctcttccgatctnnnngctggtcttctttcccctcc

SEQ ID NO: 376 - DNA, 59 bp, Artificial Sequence
  Description of Artificial Sequence: Synthetic primer
  modified_base (34)..(37): a, c, t, g, unknown or other
acactctttccctacacgacgctcttccgatctnnnngccctgcttctttttctctggt

SEQ ID NO: 377 - DNA, 51 bp, Artificial Sequence
  Description of Artificial Sequence: Synthetic primer
tggagttcagacgtgtgctcttccgatctaccattaacgcagccaacttca

SEQ ID NO: 378 - DNA, 60 bp, Artificial Sequence
  Description of Artificial Sequence: Synthetic primer
acactctttccctacacgacgctcttccgatctcatgaggtctatggacttcaagagcaa

SEQ ID NO: 379 - DNA, 56 bp, Artificial Sequence
  Description of Artificial Sequence: Synthetic primer
tggagttcagacgtgtgctcttccgatctcatcattgaccagagctctgggcagaa

SEQ ID NO: 380 - DNA, 60 bp, Artificial Sequence
  Description of Artificial Sequence: Synthetic primer
acactctttccctacacgacgctcttccgatctgcacttaccagcattacttcctaaacc

SEQ ID NO: 381 - DNA, 55 bp, Artificial Sequence
  Description of Artificial Sequence: Synthetic primer
tggagttcagacgtgtgctcttccgatctatgggctccacttttcagctctgtaa

SEQ ID NO: 382 - DNA, 57 bp, Artificial Sequence
  Description of Artificial Sequence: Synthetic primer
acactctttccctacacgacgctcttccgatctcagttcaggcacatgtaggaggga

SEQ ID NO: 383 - DNA, 56 bp, Artificial Sequence
  Description of Artificial Sequence: Synthetic primer
tggagttcagacgtgtgctcttccgatctaccgcctgcagctgtcggacactggca

SEQ ID NO: 384 - DNA, 56 bp, Artificial Sequence
  Description of Artificial Sequence: Synthetic primer
acactctttccctacacgacgctcttccgatctaaaagatgagtatgcctgccgtg

SEQ ID NO: 385 - DNA, 56 bp, Artificial Sequence
  Description of Artificial Sequence: Synthetic primer
tggagttcagacgtgtgctcttccgatctcagattgtttatatcagatgggatggg

SEQ ID NO: 386 - DNA, 59 bp, Artificial Sequence
  Description of Artificial Sequence: Synthetic primer
acactctttccctacacgacgctcttccgatctatgcaagtttggtcctgagccctccc

SEQ ID NO: 387 - DNA, 53 bp, Artificial Sequence
  Description of Artificial Sequence: Synthetic primer
tggagttcagacgtgtgctcttccgatctgatgtgggttccctgcgctctgca

SEQ ID NO: 388 - DNA, 57 bp, Artificial Sequence
  Description of Artificial Sequence: Synthetic primer
acactctttccctacacgacgctcttccgatctccagggactgagggtggaaggtcc

SEQ ID NO: 389 - DNA, 52 bp, Artificial Sequence
  Description of Artificial Sequence: Synthetic primer
tggagttcagacgtgtgctcttccgatctacctccgcctgagcagtggagaa

SEQ ID NO: 390 - RNA, 120 nt, Artificial Sequence
  Description of Artificial Sequence: Synthetic polynucleotide
aaaaaaaaaaaaaaaaaaaaaaaaaaaaaaaaaaaaaaaaaaaaaaaaaaaaaaaaaaaaaaaaaaaaaaaaaaaaaaaaaaaaaaaaaaaaaaaaaaaaaaaaaaaaaaaaaaaaaaaa

SEQ ID NO: 391 - DNA, 27 bp, Artificial Sequence
  Description of Artificial Sequence: Synthetic primer
tcgagctcggtacctaatacgactcac

SEQ ID NO: 392 - DNA, 149 bp, Artificial Sequence
  Description of Artificial Sequence: Synthetic primer
ttttttttttttttttttttttttttttttttttttttttttttttttttttttttttttttttttttttttttttttttttttttttttttttttttttttttttttttttttttttttcttcctactcaggctttattcaaagacca

SEQ ID NO: 393 - DNA, 25 bp, Homo sapiens
ttataaataggctgtaccagtgcag

SEQ ID NO: 394 - RNA, 25 nt, Artificial Sequence
  Description of Artificial Sequence: Synthetic oligonucleotide
aauauuuauccgacauggucacguc

SEQ ID NO: 395 - DNA, 83 bp, Artificial Sequence
  Description of Artificial Sequence: Synthetic oligonucleotide
gttttagagctagaaatagcaagttaaaataaggctagtccgttatcaacttgaaaaagtggcaccgagtcggtgcttttttt

SEQ ID NO: 396 - protein, 5 aa, Homo sapiens
GCTSA

SEQ ID NO: 397 - DNA, 246 bp, Artificial Sequence
  Description of Artificial Sequence: Synthetic polynucleotide
tacgtgacgtagaaagtaataatttcttgggtagtttgcagttttaaaattatgttttaaaatggactatcatatgcttaccgtaacttgaaagtatttcgatttcttggctttatatatcttgtggaaaggacgaaacaccgccttgccttctgctcgaaatgttttagagctagaaatagcaagttaaaataaggctagtccgttatcaacttgaaaaagtggcaccgagtcggtgcttttttt

SEQ ID NO: 398 - DNA, 245 bp, Artificial Sequence
  Description of Artificial Sequence: Synthetic polynucleotide
tacgtgacgtagaaagtaataatttcttgggtagtttgcagttttaaaattatgttttaaaatggactatcatatgcttaccgtaacttgaaagtatttcgatttcttggctttatatatcttgtggaaaggacgaaacaccgtgcagggcatcatcaatttgttttagagctagaaatagcaagttaaaataaggctagtccgttatcaacttgaaaaagtggcaccgagtcggtgcttttttt

SEQ ID NO: 399 - DNA, 246 bp, Artificial Sequence
  Description of Artificial Sequence: Synthetic polynucleotide
tacgtgacgtagaaagtaataatttcttgggtagtttgcagttttaaaattatgttttaaaatggactatcatatgcttaccgtaacttgaaagtatttcgatttcttggctttatatatcttgtggaaaggacgaaacaccgttaaaggaaagtaatggaccgttttagagctagaaatagcaagttaaaataaggctagtccgttatcaacttgaaaaagtggcaccgagtcggtgcttttttt

SEQ ID NO: 400 - DNA, 246 bp, Artificial Sequence
  Description of Artificial Sequence: Synthetic polynucleotide
tacgtgacgtagaaagtaataatttcttgggtagtttgcagttttaaaattatgttttaaaatggactatcatatgcttaccgtaacttgaaagtatttcgatttcttggctttatatatcttgtggaaaggacgaaacaccgttactttcctttaagaaaaggttttagagctagaaatagcaagttaaaataaggctagtccgttatcaacttgaaaaagtggcaccgagtcggtgcttttttt

SEQ ID NO: 401 - DNA, 246 bp, Artificial Sequence
  Description of Artificial Sequence: Synthetic polynucleotide
tacgtgacgtagaaagtaataatttcttgggtagtttgcagttttaaaattatgttttaaaatggactatcatatgcttaccgtaacttgaaagtatttcgatttcttggctttatatatcttgtggaaaggacgaaacaccgtaaataggctgtaccagtgcgttttagagctagaaatagcaagttaaaataaggctagtccgttatcaacttgaaaaagtggcaccgagtcggtgcttttttt

SEQ ID NO: 402 - DNA, 245 bp, Artificial Sequence
  Description of Artificial Sequence: Synthetic polynucleotide
tacgtgacgtagaaagtaataatttcttgggtagtttgcagttttaaaattatgttttaaaatggactatcatatgcttaccgtaacttgaaagtatttcgatttcttggctttatatatcttgtggaaaggacgaaacaccggtacagcctatttataagagttttagagctagaaatagcaagttaaaataaggctagtccgttatcaacttgaaaaagtggcaccgagtcggtgcttttttt

SEQ ID NO: 403 - DNA, 246 bp, Artificial Sequence
  Description of Artificial Sequence: Synthetic polynucleotide
tacgtgacgtagaaagtaataatttcttgggtagtttgcagttttaaaattatgttttaaaatggactatcatatgcttaccgtaacttgaaagtatttcgatttcttggctttatatatcttgtggaaaggacgaaacaccgatgcttccccacaccttcacgttttagagctagaaatagcaagttaaaataaggctagtccgttatcaacttgaaaaagtggcaccgagtcggtgcttttttt

SEQ ID NO: 404 - DNA, 246 bp, Artificial Sequence
  Description of Artificial Sequence: Synthetic polynucleotide
tacgtgacgtagaaagtaataatttcttgggtagtttgcagttttaaaattatgttttaaaatggactatcatatgcttaccgtaacttgaaagtatttcgatttcttggctttatatatcttgtggaaaggacgaaacaccgttcattattaggcatgttgggttttagagctagaaatagcaagttaaaataaggctagtccgttatcaacttgaaaaagtggcaccgagtcggtgcttttttt

SEQ ID NO: 405 - DNA, 246 bp, Artificial Sequence
  Description of Artificial Sequence: Synthetic polynucleotide
tacgtgacgtagaaagtaataatttcttgggtagtttgcagttttaaaattatgttttaaaatggactatcatatgcttaccgtaacttgaaagtatttcgatttcttggctttatatatcttgtggaaaggacgaaacaccgaacatgcctaataatgaaaagttttagagctagaaatagcaagttaaaataaggctagtccgttatcaacttgaaaaagtggcaccgagtcggtgcttttttt

SEQ ID NO: 406 - DNA, 246 bp, Artificial Sequence
  Description of Artificial Sequence: Synthetic polynucleotide
tacgtgacgtagaaagtaataatttcttgggtagtttgcagttttaaaattatgttttaaaatggactatcatatgcttaccgtaacttgaaagtatttcgatttcttggctttatatatcttgtggaaaggacgaaacaccgttcctttaagaaaagtgcaagttttagagctagaaatagcaagttaaaataaggctagtccgttatcaacttgaaaaagtggcaccgagtcggtgcttttttt

SEQ ID NO: 407 - DNA, 246 bp, Artificial Sequence
  Description of Artificial Sequence: Synthetic polynucleotide
tacgtgacgtagaaagtaataatttcttgggtagtttgcagttttaaaattatgttttaaaatggactatcatatgcttaccgtaacttgaaagtatttcgatttcttggctttatatatcttgtggaaaggacgaaacaccgacagcctatttataagaagagttttagagctagaaatagcaagttaaaataaggctagtccgttatcaacttgaaaaagtggcaccgagtcggtgcttttttt

SEQ ID NO: 408 - DNA, 246 bp, Artificial Sequence
  Description of Artificial Sequence: Synthetic polynucleotide
tacgtgacgtagaaagtaataatttcttgggtagtttgcagttttaaaattatgttttaaaatggactatcatatgcttaccgtaacttgaaagtatttcgatttcttggctttatatatcttgtggaaaggacgaaacaccgaaataggctgtaccagtgcagttttagagctagaaatagcaagttaaaataaggctagtccgttatcaacttgaaaaagtggcaccgagtcggtgcttttttt

SEQ ID NO: 409 - DNA, 246 bp, Artificial Sequence
  Description of Artificial Sequence: Synthetic polynucleotide
tacgtgacgtagaaagtaataatttcttgggtagtttgcagttttaaaattatgttttaaaatggactatcatatgcttaccgtaacttgaaagtatttcgatttcttggctttatatatcttgtggaaaggacgaaacaccgtattaggcatgttggagactgttttagagctagaaatagcaagttaaaataaggctagtccgttatcaacttgaaaaagtggcaccgagtcggtgcttttttt

SEQ ID NO: 410 - RNA, 23 nt, Artificial Sequence
  Description of Artificial Sequence: Synthetic oligonucleotide
ccuugccuucugcucgaaauuga

SEQ ID NO: 411 - RNA, 23 nt, Artificial Sequence
  Description of Artificial Sequence: Synthetic oligonucleotide
gugcagggcaucaucaauuucga

SEQ ID NO: 412 - RNA, 23 nt, Artificial Sequence
  Description of Artificial Sequence: Synthetic oligonucleotide
uuacuuuccuuuaagaaaagugc

SEQ ID NO: 413 - RNA, 23 nt, Artificial Sequence
  Description of Artificial Sequence: Synthetic oligonucleotide
gguacagccuauuuauaagaaga

SEQ ID NO: 414 - RNA, 23 nt, Artificial Sequence
  Description of Artificial Sequence: Synthetic oligonucleotide
augcuuccccacaccuucacugg

SEQ ID NO: 415 - RNA, 23 nt, Artificial Sequence
  Description of Artificial Sequence: Synthetic oligonucleotide
aacaugccuaauaaugaaaaagc

SEQ ID NO: 416 - RNA, 23 nt, Artificial Sequence
  Description of Artificial Sequence: Synthetic oligonucleotide
uuccuuuaagaaaagugcaaagu

SEQ ID NO: 417 - RNA, 23 nt, Artificial Sequence
  Description of Artificial Sequence: Synthetic oligonucleotide
acagccuauuuauaagaagaaga

SEQ ID NO: 418 - RNA, 20 nt, Artificial Sequence
  Description of Artificial Sequence: Synthetic oligonucleotide
ccuugccuucugcucgaaau

SEQ ID NO: 419 - RNA, 20 nt, Artificial Sequence
  Description of Artificial Sequence: Synthetic oligonucleotide
gugcagggcaucaucaauuu

SEQ ID NO: 420 - RNA, 20 nt, Artificial Sequence
  Description of Artificial Sequence: Synthetic oligonucleotide
uuaaaggaaaguaauggacc

SEQ ID NO: 421 - RNA, 20 nt, Artificial Sequence
  Description of Artificial Sequence: Synthetic oligonucleotide
uuacuuuccuuuaagaaaag

SEQ ID NO: 422 - RNA, 20 nt, Artificial Sequence
  Description of Artificial Sequence: Synthetic oligonucleotide
uaaauaggcuguaccagugc

SEQ ID NO: 423 - RNA, 20 nt, Artificial Sequence
  Description of Artificial Sequence: Synthetic oligonucleotide
gguacagccuauuuauaaga

SEQ ID NO: 424 - RNA, 20 nt, Artificial Sequence
  Description of Artificial Sequence: Synthetic oligonucleotide
augcuuccccacaccuucac

SEQ ID NO: 425 - RNA, 20 nt, Artificial Sequence
  Description of Artificial Sequence: Synthetic oligonucleotide
ucuauccagaaaacacggug

SEQ ID NO: 426 - RNA, 20 nt, Artificial Sequence
  Description of Artificial Sequence: Synthetic oligonucleotide
uucauuauuaggcauguugg

SEQ ID NO: 427 - RNA, 20 nt, Artificial Sequence
  Description of Artificial Sequence: Synthetic oligonucleotide
aacaugccuaauaaugaaaa

SEQ ID NO: 428 - RNA, 23 nt, Artificial Sequence
  Description of Artificial Sequence: Synthetic oligonucleotide
ucuauccagaaaacacggugggc

SEQ ID NO: 429 - DNA, 23 bp, Homo sapiens
tccaccccagaagacctgcctga

SEQ ID NO: 430 - RNA, 23 nt, Artificial Sequence
  Description of Artificial Sequence: Synthetic oligonucleotide
uccaccccagaagaccugccuga

SEQ ID NO: 431 - DNA, 23 bp, Homo sapiens
ccttgccttctgctcgaaattga

SEQ ID NO: 432 - DNA, 23 bp, Homo sapiens
gtgcagggcatcatcaatttcga

SEQ ID NO: 433 - DNA, 23 bp, Homo sapiens
ttaaaggaaagtaatggaccagt

SEQ ID NO: 434 - DNA, 23 bp, Homo sapiens
ttactttcctttaagaaaagtgc

SEQ ID NO: 435 - DNA, 23 bp, Homo sapiens
ggtacagcctatttataagaaga

SEQ ID NO: 436 - DNA, 23 bp, Homo sapiens
atgcttccccacaccttcactgg

SEQ ID NO: 437 - DNA, 23 bp, Homo sapiens
ttcattattaggcatgttggaga

SEQ ID NO: 438 - DNA, 23 bp, Homo sapiens
acagcctatttataagaagaaga

SEQ ID NO: 439 - DNA, 23 bp, Homo sapiens
aaataggctgtaccagtgcaggt

SEQ ID NO: 440 - DNA, 6208 bp, Artificial Sequence
  Description of Artificial Sequence: Synthetic polynucleotide
gattattgactagttattaatagtaatcaattacggggtcattagttcatagcccatatatggagttccgcgttacataacttacggtaaatggcccgcctggctgaccgcccaacgacccccgcccattgacgtcaataatgacgtatgttcccatagtaacgccaatagggactttccattgacgtcaatgggtggagtatttacggtaaactgcccacttggcagtacatcaagtgtatcatatgccaagtacgccccctattgacgtcaatgacggtaaatggcccgcctggcattatgcccagtacatgaccttatgggactttcctacttggcagtacatctacgtattagtcatcgctattaccatggtgatgcggttttggcagtacatcaatgggcgtggatagcggtttgactcacggggatttccaagtctccaccccattgacgtcaatgggagtttgttttggcaccaaaatcaacgggactttccaaaatgtcgtaacaactccgccccattgacgcaaatgggcggtaggcgtgtacggtgggaggtctatataagcagagctggtttagtgaaccgtcagatccgctagagatccgcggccgctaatacgactcactatagggagagccgccaccatgacctctgagaagggccctagcacaggcgaccccaccctgcggcggagaatcgagagctgggagttcgacgtgttctacgaccctagagaactgagaaaggaaacctgcctgctgtacgagatcaagtggggcatgagcagaaagatctggcggagctctggcaagaacaccaccaaccacgtggaagtgaatttcatcaagaagttcaccagcgagagaaggttccacagcagcatcagctgcagcatcacctggttcctgagctggtccccttgctgggaatgcagccaggccatcagagagttcctgagccaacaccccggagtgacactggtgatctacgtggccagactgttctggcacatggaccagagaaacagacagggcctgagagatctggtcaacagcggcgtgactatccagatcatgcgggccagcgagtactaccactgttggcggaacttcgtgaactacccccccggcgatgaggcccactggcctcagtaccctcctctgtggatgatgctgtacgccctggaactgcactgcatcatcctgtctctgcctccatgtctgaagatctctagaagatggcagaaccacctggccttcttcagactgcacctgcagaattgccactaccagaccatccccccccacatcctgctggctacaggcctgatccacccttctgtgacctggagacttaagagcggaggatctagcggcggctctagcggatctgagacacctggcacaagcgagtctgccacacctgagagtagcggcggatcttctggtggctctgacaagaagtacagcatcggcctggccatcggcaccaactctgtgggctgggccgtgatcaccgacgagtacaaggtgcccagcaagaaattcaaggtgctgggcaacaccgaccggcacagcatcaagaagaacctgatcggagccctgctgttcgacagcggcgaaacagccgaggccacccggctgaagagaaccgccagaagaagatacaccagacggaagaaccggatctgctatctgcaagagatcttcagcaacgagatggccaaggtggacgacagcttcttccacagactggaagagtccttcctggtggaagaggataagaagcacgagcggcaccccatcttcggcaacatcgtggacgaggtggcctaccacgagaagtaccccaccatctaccacctgagaaagaaactggtggacagcaccgacaaggccgacctgcggctgatctatctggccctggcccacatgatcaagttccggggccacttcctgatcgagggcgacctgaaccccgacaacagcgacgtggacaagctgttcatccagctggtgcagacctacaaccagctgttcgaggaaaaccccatcaacgccagcggcgtggacgccaaggccatcctgtctgccagactgagcaagagcagacggctggaaaatctgatcgcccagctgcccggcgagaagaagaatggcctgttcggaaacctgattgccctgagcctgggcctgacccccaacttcaagagcaacttcgacctggccgaggatgccaaactgcagctgagcaaggacacctacgacgacgacctggacaacctgctggcccagatcggcgaccagtacgccgacctgtttctggccgccaagaacctgtccgacgccatcctgctgagcgacatcctgagagtgaacaccgagatcaccaaggcccccctgagcgcctctatgatcaagagatacgacgagcaccaccaggacctgaccctgctgaaagctctcgtgcggcagcagctgcctgagaagtacaaagagattttcttcgaccagagcaagaacggctacgccggctacattgacggcggagccagccaggaagagttctacaagttcatcaagcccatcctggaaaagatggacggcaccgaggaactgctcgtgaagctgaacagagaggacctgctgcggaagcagcggaccttcgacaacggcagcatcccccaccagatccacctgggagagctgcacgccattctgcggcggcaggaagatttttacccattcctgaaggacaaccgggaaaagatcgagaagatcctgaccttccgcatcccctactacgtgggccctctggccaggggaaacagcagattcgcctggatgaccagaaagagcgaggaaaccatcaccccctggaacttcgaggaagtggtggacaagggcgcttccgcccagagcttcatcgagcggatgaccaacttcgataagaacctgcccaacgagaaggtgctgcccaagcacagcctgctgtacgagtacttcaccgtgtataacgagctgaccaaagtgaaatacgtgaccgagggaatgagaaagcccgccttcctgagcggcgagcagaaaaaggccatcgtggacctgctgttcaagaccaaccggaaagtgaccgtgaagcagctgaaagaggactacttcaagaaaatcgagtgcttcgactccgtggaaatctccggcgtggaagatcggttcaacgcctccctgggcacataccacgatctgctgaaaattatcaaggacaaggacttcctggacaatgaggaaaacgaggacattctggaagatatcgtgctgaccctgacactgtttgaggacagagagatgatcgaggaacggctgaaaacctatgcccacctgttcgacgacaaagtgatgaagcagctgaagcggcggagatacaccggctggggcaggctgagccggaagctgatcaacggcatccgggacaagcagtccggcaagacaatcctggatttcctgaagtccgacggcttcgccaacagaaacttcatgcagctgatccacgacgacagcctgacctttaaagaggacatccagaaagcccaggtgtccggccagggcgatagcctgcacgagcacattgccaatctggccggcagccccgccattaagaagggcatcctgcagacagtgaaggtggtggacgagctcgtgaaagtgatgggccggcacaagcccgagaacatcgtgatcgaaatggccagagagaaccagaccacccagaagggacagaagaacagccgcgagagaatgaagcggatcgaagagggcatcaaagagctgggcagccagatcctgaaagaacaccccgtggaaaacacccagctgcagaacgagaagctgtacctgtactacctgcagaatgggcgggatatgtacgtggaccaggaactggacatcaaccggctgtccgactacgatgtggaccatatcgtgcctcagagctttctgaaggacgactccatcgacaacaaggtgctgaccagaagcgacaagaaccggggcaagagcgacaacgtgccctccgaagaggtcgtgaagaagatgaagaactactggcggcagctgctgaacgccaagctgattacccagagaaagttcgacaatctgaccaaggccgagagaggcggcctgagcgaactggataaggccggcttcatcaagagacagctggtggaaacccggcagatcacaaagcacgtggcacagatcctggactcccggatgaacactaagtacgacgagaatgacaagctgatccgggaagtgaaagtgatcaccctgaagtccaagctggtgtccgatttccggaaggatttccagttttacaaagtgcgcgagatcaacaactaccaccacgcccacgacgcctacctgaacgccgtcgtgggaaccgccctgatcaaaaagtaccctaagctggaaagcgagttcgtgtacggcgactacaaggtgtacgacgtgcggaagatgatcgccaagagcgagcaggaaatcggcaaggctaccgccaagtacttcttctacagcaacatcatgaactttttcaagaccgagattaccctggccaacggcgagatccggaagcggcctctgatcgagacaaacggcgaaaccggggagatcgtgtgggataagggccgggattttgccaccgtgcggaaagtgctgagcatgccccaagtgaatatcgtgaaaaagaccgaggtgcagacaggcggcttcagcaaagagtctatcctgcccaagaggaacagcgataagctgatcgccagaaagaaggactgggaccctaagaagtacggcggcttcgacagccccaccgtggcctattctgtgctggtggtggccaaagtggaaaagggcaagtccaagaaactgaagagtgtgaaagagctgctggggatcaccatcatggaaagaagcagcttcgagaagaatcccatcgactttctggaagccaagggctacaaagaagtgaaaaaggacctgatcatcaagctgcctaagtactccctgttcgagctggaaaacggccggaagagaatgctggcctctgccggcgaactgcagaagggaaacgaactggccctgccctccaaatatgtgaacttcctgtacctggccagccactatgagaagctgaagggctcccccgaggataatgagcagaaacagctgtttgtggaacagcacaagcactacctggacgagatcatcgagcagatcagcgagttctccaagagagtgatcctggccgacgctaatctggacaaagtgctgtccgcctacaacaagcaccgggataagcccatcagagagcaggccgagaatatcatccacctgtttaccctgaccaatctgggagcccctgccgccttcaagtactttgacaccaccatcgaccggaagaggtacaccagcaccaaagaggtgctggacgccaccctgatccaccagagcatcaccggcctgtacgagacacggatcgacctgtctcagctgggaggtgactctggtggaagcggaggatctggcggcagcaccaatctgagcgacatcatcgagaaagagacaggcaagcagctggtcatccaagagtccatcctgatgctgcctgaagaggtggaagaagtgatcggcaacaagcccgagtccgacatcctggtgcacaccgcctacgatgagagcaccgacgagaacgtgatgctgctgacctctgacgcccctgagtacaagccttgggctctcgtgatccaggacagcaacggcgagaacaagatcaagatgctgagcggcggctctggtggctctggcggatctacaaacctgtccgatattattgagaaagaaaccgggaaacagctcgtgattcaagagtctattctcatgctcccggaagaagtcgaggaagtcattggaaacaagcctgagagcgatattctggtccatacagcctacgacgagtctaccgatgagaatgtcatgctcctcaccagcgacgctcccgagtataagccatgggcacttgtcattcaggactccaatggggaaaacaaaatcaaaatgctcccaaagaaaaaacgcaaggtggagggagctgataagcgcaccgccgatggttccgagttcgaaagccccaagaagaagaggaaagtct

SEQ ID NO: 441 - protein, 1852 aa, Pongo pygmaeus
MTSEKGPSTGDPTLRRRIESWEFDVFYDPRELRKETCLLYEIKWGMSRKIWRSSGKNTTNHVEVNFIKKFTSERRFHSSISCSITWFLSWSPCWECSQAIREFLSQHPGVTLVIYVARLFWHMDQRNRQGLRDLVNSGVTIQIMRASEYYHCWRNFVNYPPGDEAHWPQYPPLWMMLYALELHCIILSLPPCLKISRRWQNHLAFFRLHLQNCHYQTIPPHILLATGLIHPSVTWRLKSGGSSGGSSGSETPGTSESATPESSGGSSGGSDKKYSIGLAIGTNSVGWAVITDEYKVPSKKFKVLGNTDRHSIKKNLIGALLFDSGETAEATRLKRTARRRYTRRKNRICYLQEIFSNEMAKVDDSFFHRLEESFLVEEDKKHERHPIFGNIVDEVAYHEKYPTIYHLRKKLVDSTDKADLRLIYLALAHMIKFRGHFLIEGDLNPDNSDVDKLFIQLVQTYNQLFEENPINASGVDAKAILSARLSKSRRLENLIAQLPGEKKNGLFGNLIALSLGLTPNFKSNFDLAEDAKLQLSKDTYDDDLDNLLAQIGDQYADLFLAAKNLSDAILLSDILRVNTEITKAPLSASMIKRYDEHHQDLTLLKALVRQQLPEKYKEIFFDQSKNGYAGYIDGGASQEEFYKFIKPILEKMDGTEELLVKLNREDLLRKQRTFDNGSIPHQIHLGELHAILRRQEDFYPFLKDNREKIEKILTFRIPYYVGPLARGNSRFAWMTRKSEETITPWNFEEVVDKGASAQSFIERMTNFDKNLPNEKVLPKHSLLYEYFTVYNELTKVKYVTEGMRKPAFLSGEQKKAIVDLLFKTNRKVTVKQLKEDYFKKIECFDSVEISGVEDRFNASLGTYHDLLKIIKDKDFLDNEENEDILEDIVLTLTLFEDREMIEERLKTYAHLFDDKVMKQLKRRRYTGWGRLSRKLINGIRDKQSGKTILDFLKSDGFANRNFMQLIHDDSLTFKEDIQKAQVSGQGDSLHEHIANLAGSPAIKKGILQTVKVVDELVKVMGRHKPENIVIEMARENQTTQKGQKNSRERMKRIEEGIKELGSQILKEHPVENTQLQNEKLYLYYLQNGRDMYVDQELDINRLSDYDVDHIVPQSFLKDDSIDNKVLTRSDKNRGKSDNVPSEEVVKKMKNYWRQLLNAKLITQRKFDNLTKAERGGLSELDKAGFIKRQLVETRQITKHVAQILDSRMNTKYDENDKLIREVKVITLKSKLVSDFRKDFQFYKVREINNYHHAHDAYLNAVVGTALIKKYPKLESEFVYGDYKVYDVRKMIAKSEQEIGKATAKYFFYSNIMNFFKTEITLANGEIRKRPLIETNGETGEIVWDKGRDFATVRKVLSMPQVNIVKKTEVQTGGFSKESILPKRNSDKLIARKKDWDPKKYGGFDSPTVAYSVLVVAKVEKGKSKKLKSVKELLGITIMERSSFEKNPIDFLEAKGYKEVKKDLIIKLPKYSLFELENGRKRMLASAGELQKGNELALPSKYVNFLYLASHYEKLKGSPEDNEQKQLFVEQHKHYLDEIIEQISEFSKRVILADANLDKVLSAYNKHRDKPIREQAENIIHLFTLTNLGAPAAFKYFDTTIDRKRYTSTKEVLDATLIHQSITGLYETRIDLSQLGGDSGGSGGSGGSTNLSDIIEKETGKQLVIQESILMLPEEVEEVIGNKPESDILVHTAYDESTDENVMLLTSDAPEYKPWALVIQDSNGENKIKMLSGGSGGSGGSTNLSDIIEKETGKQLVIQESILMLPEEVEEVIGNKPESDILVHTAYDESTDENVMLLTSDAPEYKPWALVIQDSNGENKIKMLPKKKRKVEGADKRTADGSEFESPKKKRKV

SEQ ID NO: 442 - DNA, 6174 bp, Artificial Sequence
  Description of Artificial Sequence: Synthetic polynucleotide
cattgattattgactagttattaatagtaatcaattacggggtcattagttcatagcccatatatggagttccgcgttacataacttacggtaaatggcccgcctggctgaccgcccaacgacccccgcccattgacgtcaataatgacgtatgttcccatagtaacgccaatagggactttccattgacgtcaatgggtggagtatttacggtaaactgcccacttggcagtacatcaagtgtatcatatgccaagtacgccccctattgacgtcaatgacggtaaatggcccgcctggcattatgcccagtacatgaccttatgggactttcctacttggcagtacatctacgtattagtcatcgctattaccatggtgatgcggttttggcagtacatcaatgggcgtggatagcggtttgactcacggggatttccaagtctccaccccattgacgtcaatgggagtttgttttggcaccaaaatcaacgggactttccaaaatgtcgtaacaactccgccccattgacgcaaatgggcggtaggcgtgtacggtgggaggtctatataagcagagctggtttagtgaaccgtcagatccgctagagatccgcggccgctaatacgactcactatagggagagccgccaccatggccggctacgagtgcgtgcgggtgtccgagaagctggatttcgataccttcgagttccagttcgagaacctgcactacgccacagagagacacagaacctacgtgatcttcgacgtgaaacctcagagcgccggaggcagaagccggcggctgtggggctacatcatcaacaaccccaacgtgtgccacgccgagctgatcctgatgagcatgatcgaccggcacctggaatctaatcctggcgtgtacgccatgacctggtacatgagctggtccccatgtgctaattgcagcagcaagctgaacccttggctgaaaaacctgctcgaggaacagggccacaccctgaccatgcacttcagcagaatctacgacagagatagagaaggcgaccaccgaggactgagaggcctgaagcacgtgtccaacagcttcagaatgggcgtggtcggaagagccgaggtgaaggaatgtctggccgaatacgtggaagccagcagaagaacactgacatggctggacaccacagagagcatggccgccaagatgcggagaaagctgttctgcatcctggtgcggtgcgccggcatgagagagagcggcatccccctgcacctgtttaccctgcagacccctctgctgagcggcagagtggtgtggtggcgggtgcttaagagcggaggatctagcggcggctctagcggatctgagacacctggcacaagcgagtctgccacacctgagagtagcggcggatcttctggtggctctgacaagaagtacagcatcggcctggccatcggcaccaactctgtgggctgggccgtgatcaccgacgagtacaaggtgcccagcaagaaattcaaggtgctgggcaacaccgaccggcacagcatcaagaagaacctgatcggagccctgctgttcgacagcggcgaaacagccgaggccacccggctgaagagaaccgccagaagaagatacaccagacggaagaaccggatctgctatctgcaagagatcttcagcaacgagatggccaaggtggacgacagcttcttccacagactggaagagtccttcctggtggaagaggataagaagcacgagcggcaccccatcttcggcaacatcgtggacgaggtggcctaccacgagaagtaccccaccatctaccacctgagaaagaaactggtggacagcaccgacaaggccgacctgcggctgatctatctggccctggcccacatgatcaagttccggggccacttcctgatcgagggcgacctgaaccccgacaacagcgacgtggacaagctgttcatccagctggtgcagacctacaaccagctgttcgaggaaaaccccatcaacgccagcggcgtggacgccaaggccatcctgtctgccagactgagcaagagcagacggctggaaaatctgatcgcccagctgcccggcgagaagaagaatggcctgttcggaaacctgattgccctgagcctgggcctgacccccaacttcaagagcaacttcgacctggccgaggatgccaaactgcagctgagcaaggacacctacgacgacgacctggacaacctgctggcccagatcggcgaccagtacgccgacctgtttctggccgccaagaacctgtccgacgccatcctgctgagcgacatcctgagagtgaacaccgagatcaccaaggcccccctgagcgcctctatgatcaagagatacgacgagcaccaccaggacctgaccctgctgaaagctctcgtgcggcagcagctgcctgagaagtacaaagagattttcttcgaccagagcaagaacggctacgccggctacattgacggcggagccagccaggaagagttctacaagttcatcaagcccatcctggaaaagatggacggcaccgaggaactgctcgtgaagctgaacagagaggacctgctgcggaagcagcggaccttcgacaacggcagcatcccccaccagatccacctgggagagctgcacgccattctgcggcggcaggaagatttttacccattcctgaaggacaaccgggaaaagatcgagaagatcctgaccttccgcatcccctactacgtgggccctctggccaggggaaacagcagattcgcctggatgaccagaaagagcgaggaaaccatcaccccctggaacttcgaggaagtggtggacaagggcgcttccgcccagagcttcatcgagcggatgaccaacttcgataagaacctgcccaacgagaaggtgctgcccaagcacagcctgctgtacgagtacttcaccgtgtataacgagctgaccaaagtgaaatacgtgaccgagggaatgagaaagcccgccttcctgagcggcgagcagaaaaaggccatcgtggacctgctgttcaagaccaaccggaaagtgaccgtgaagcagctgaaagaggactacttcaagaaaatcgagtgcttcgactccgtggaaatctccggcgtggaagatcggttcaacgcctccctgggcacataccacgatctgctgaaaattatcaaggacaaggacttcctggacaatgaggaaaacgaggacattctggaagatatcgtgctgaccctgacactgtttgaggacagagagatgatcgaggaacggctgaaaacctatgcccacctgttcgacgacaaagtgatgaagcagctgaagcggcggagatacaccggctggggcaggctgagccggaagctgatcaacggcatccgggacaagcagtccggcaagacaatcctggatttcctgaagtccgacggcttcgccaacagaaacttcatgcagctgatccacgacgacagcctgacctttaaagaggacatccagaaagcccaggtgtccggccagggcgatagcctgcacgagcacattgccaatctggccggcagccccgccattaagaagggcatcctgcagacagtgaaggtggtggacgagctcgtgaaagtgatgggccggcacaagcccgagaacatcgtgatcgaaatggccagagagaaccagaccacccagaagggacagaagaacagccgcgagagaatgaagcggatcgaagagggcatcaaagagctgggcagccagatcctgaaagaacaccccgtggaaaacacccagctgcagaacgagaagctgtacctgtactacctgcagaatgggcgggatatgtacgtggaccaggaactggacatcaaccggctgtccgactacgatgtggaccatatcgtgcctcagagctttctgaaggacgactccatcgacaacaaggtgctgaccagaagcgacaagaaccggggcaagagcgacaacgtgccctccgaagaggtcgtgaagaagatgaagaactactggcggcagctgctgaacgccaagctgattacccagagaaagttcgacaatctgaccaaggccgagagaggcggcctgagcgaactggataaggccggcttcatcaagagacagctggtggaaacccggcagatcacaaagcacgtggcacagatcctggactcccggatgaacactaagtacgacgagaatgacaagctgatccgggaagtgaaagtgatcaccctgaagtccaagctggtgtccgatttccggaaggatttccagttttacaaagtgcgcgagatcaacaactaccaccacgcccacgacgcctacctgaacgccgtcgtgggaaccgccctgatcaaaaagtaccctaagctggaaagcgagttcgtgtacggcgactacaaggtgtacgacgtgcggaagatgatcgccaagagcgagcaggaaatcggcaaggctaccgccaagtacttcttctacagcaacatcatgaactttttcaagaccgagattaccctggccaacggcgagatccggaagcggcctctgatcgagacaaacggcgaaaccggggagatcgtgtgggataagggccgggattttgccaccgtgcggaaagtgctgagcatgccccaagtgaatatcgtgaaaaagaccgaggtgcagacaggcggcttcagcaaagagtctatcctgcccaagaggaacagcgataagctgatcgccagaaagaaggactgggaccctaagaagtacggcggcttcgacagccccaccgtggcctattctgtgctggtggtggccaaagtggaaaagggcaagtccaagaaactgaagagtgtgaaagagctgctggggatcaccatcatggaaagaagcagcttcgagaagaatcccatcgactttctggaagccaagggctacaaagaagtgaaaaaggacctgatcatcaagctgcctaagtactccctgttcgagctggaaaacggccggaagagaatgctggcctctgccggcgaactgcagaagggaaacgaactggccctgccctccaaatatgtgaacttcctgtacctggccagccactatgagaagctgaagggctcccccgaggataatgagcagaaacagctgtttgtggaacagcacaagcactacctggacgagatcatcgagcagatcagcgagttctccaagagagtgatcctggccgacgctaatctggacaaagtgctgtccgcctacaacaagcaccgggataagcccatcagagagcaggccgagaatatcatccacctgtttaccctgaccaatctgggagcccctgccgccttcaagtactttgacaccaccatcgaccggaagaggtacaccagcaccaaagaggtgctggacgccaccctgatccaccagagcatcaccggcctgtacgagacacggatcgacctgtctcagctgggaggtgactctggtggaagcggaggatctggcggcagcaccaatctgagcgacatcatcgagaaagagacaggcaagcagctggtcatccaagagtccatcctgatgctgcctgaagaggtggaagaagtgatcggcaacaagcccgagtccgacatcctggtgcacaccgcctacgatgagagcaccgacgagaacgtgatgctgctgacctctgacgcccctgagtacaagccttgggctctcgtgatccaggacagcaacggcgagaacaagatcaagatgctgagcggcggctctggtggctctggcggatctacaaacctgtccgatattattgagaaagaaaccgggaaacagctcgtgattcaagagtctattctcatgctcccggaagaagtcgaggaagtcattggaaacaagcctgagagcgatattctggtccatacagcctacgacgagtctaccgatgagaatgtcatgctcctcaccagcgacgctcccgagtataagccatgggcacttgtcattcaggactccaatggggaaaacaaaatcaaaatgctcccaaagaaaaaacgcaaggtggagggagctgataagcgcaccgccgatggttccgagttcgaaagccccaagaagaagaggaaagt

SEQ ID NO: 443 - protein, 1839 aa, Petromyzon marinus
MAGYECVRVSEKLDFDTFEFQFENLHYATERHRTYVIFDVKPQSAGGRSRRLWGYIINNPNVCHAELILMSMIDRHLESNPGVYAMTWYMSWSPCANCSSKLNPWLKNLLEEQGHTLTMHFSRIYDRDREGDHRGLRGLKHVSNSFRMGVVGRAEVKECLAEYVEASRRTLTWLDTTESMAAKMRRKLFCILVRCAGMRESGIPLHLFTLQTPLLSGRVVWWRVLKSGGSSGGSSGSETPGTSESATPESSGGSSGGSDKKYSIGLAIGTNSVGWAVITDEYKVPSKKFKVLGNTDRHSIKKNLIGALLFDSGETAEATRLKRTARRRYTRRKNRICYLQEIFSNEMAKVDDSFFHRLEESFLVEEDKKHERHPIFGNIVDEVAYHEKYPTIYHLRKKLVDSTDKADLRLIYLALAHMIKFRGHFLIEGDLNPDNSDVDKLFIQLVQTYNQLFEENPINASGVDAKAILSARLSKSRRLENLIAQLPGEKKNGLFGNLIALSLGLTPNFKSNFDLAEDAKLQLSKDTYDDDLDNLLAQIGDQYADLFLAAKNLSDAILLSDILRVNTEITKAPLSASMIKRYDEHHQDLTLLKALVRQQLPEKYKEIFFDQSKNGYAGYIDGGASQEEFYKFIKPILEKMDGTEELLVKLNREDLLRKQRTFDNGSIPHQIHLGELHAILRRQEDFYPFLKDNREKIEKILTFRIPYYVGPLARGNSRFAWMTRKSEETITPWNFEEVVDKGASAQSFIERMTNFDKNLPNEKVLPKHSLLYEYFTVYNELTKVKYVTEGMRKPAFLSGEQKKAIVDLLFKTNRKVTVKQLKEDYFKKIECFDSVEISGVEDRFNASLGTYHDLLKIIKDKDFLDNEENEDILEDIVLTLTLFEDREMIEERLKTYAHLFDDKVMKQLKRRRYTGWGRLSRKLINGIRDKQSGKTILDFLKSDGFANRNFMQLIHDDSLTFKEDIQKAQVSGQGDSLHEHIANLAGSPAIKKGILQTVKVVDELVKVMGRHKPENIVIEMARENQTTQKGQKNSRERMKRIEEGIKELGSQILKEHPVENTQLQNEKLYLYYLQNGRDMYVDQELDINRLSDYDVDHIVPQSFLKDDSIDNKVLTRSDKNRGKSDNVPSEEVVKKMKNYWRQLLNAKLITQRKFDNLTKAERGGLSELDKAGFIKRQLVETRQITKHVAQILDSRMNTKYDENDKLIREVKVITLKSKLVSDFRKDFQFYKVREINNYHHAHDAYLNAVVGTALIKKYPKLESEFVYGDYKVYDVRKMIAKSEQEIGKATAKYFFYSNIMNFFKTEITLANGEIRKRPLIETNGETGEIVWDKGRDFATVRKVLSMPQVNIVKKTEVQTGGFSKESILPKRNSDKLIARKKDWDPKKYGGFDSPTVAYSVLVVAKVEKGKSKKLKSVKELLGITIMERSSFEKNPIDFLEAKGYKEVKKDLIIKLPKYSLFELENGRKRMLASAGELQKGNELALPSKYVNFLYLASHYEKLKGSPEDNEQKQLFVEQHKHYLDEIIEQISEFSKRVILADANLDKVLSAYNKHRDKPIREQAENIIHLFTLTNLGAPAAFKYFDTTIDRKRYTSTKEVLDATLIHQSITGLYETRIDLSQLGGDSGGSGGSGGSTNLSDIIEKETGKQLVIQESILMLPEEVEEVIGNKPESDILVHTAYDESTDENVMLLTSDAPEYKPWALVIQDSNGENKIKMLSGGSGGSGGSTNLSDIIEKETGKQLVIQESILMLPEEVEEVIGNKPESDILVHTAYDESTDENVMLLTSDAPEYKPWALVIQDSNGENKIKMLPKKKRKVEGADKRTADGSEFESPKKKRK

SEQ ID NO: 444 - DNA, 6105 bp, Artificial Sequence
  Description of Artificial Sequence: Synthetic polynucleotide
cattgattattgactagttattaatagtaatcaattacggggtcattagttcatagcccatatatggagttccgcgttacataacttacggtaaatggcccgcctggctgaccgcccaacgacccccgcccattgacgtcaataatgacgtatgttcccatagtaacgccaatagggactttccattgacgtcaatgggtggagtatttacggtaaactgcccacttggcagtacatcaagtgtatcatatgccaagtacgccccctattgacgtcaatgacggtaaatggcccgcctggcattatgcccagtacatgaccttatgggactttcctacttggcagtacatctacgtattagtcatcgctattaccatggtgatgcggttttggcagtacatcaatgggcgtggatagcggtttgactcacggggatttccaagtctccaccccattgacgtcaatgggagtttgttttggcaccaaaatcaacgggactttccaaaatgtcgtaacaactccgccccattgacgcaaatgggcggtaggcgtgtacggtgggaggtctatataagcagagctggtttagtgaaccgtcagatccgctagagatccgcggccgctaatacgactcactatagggagagccgccaccatggctggcgatgagaacgtgcgggtgagtgaaaagctggacttcgacaccttcgagttccagttcgagaatctgcactacgccaccgagagacaccggacctacgtgatcttcgacgtgaaacctcagtctgccggcggcagaagccggcggctgtggggctacatcatcaacaaccctaacgtgtgccacgccgagctgatcctgatgagcatgatcgacagacacctggaaagcaaccccggcgtgtacgccatgacctggtacatgtcttggtccccatgtgccaactgcagcagcaagctgaacccctggctgaaaaacctgctggaggaacagggccacaccctgatgatgcacttcagcagaatctacgaccgggaccgcgagggcgaccacagaggcctgagaggactgaagcacgtgtccaacagcttcagaatgggcgtggtgggcagagccgaagtgaaggaatgcctggccgagtacgtggaagccagcagaagaacactgacctggctggatacaaccgagagcatggccgccaagatgagaaggaagctgttctgcatcctggtgcggtgcgccggcatgcgggaatctggcatgcctctgcacctgtttacccttaagagcggaggatctagcggcggctctagcggatctgagacacctggcacaagcgagtctgccacacctgagagtagcggcggatcttctggtggctctgacaagaagtacagcatcggcctggccatcggcaccaactctgtgggctgggccgtgatcaccgacgagtacaaggtgcccagcaagaaattcaaggtgctgggcaacaccgaccggcacagcatcaagaagaacctgatcggagccctgctgttcgacagcggcgaaacagccgaggccacccggctgaagagaaccgccagaagaagatacaccagacggaagaaccggatctgctatctgcaagagatcttcagcaacgagatggccaaggtggacgacagcttcttccacagactggaagagtccttcctggtggaagaggataagaagcacgagcggcaccccatcttcggcaacatcgtggacgaggtggcctaccacgagaagtaccccaccatctaccacctgagaaagaaactggtggacagcaccgacaaggccgacctgcggctgatctatctggccctggcccacatgatcaagttccggggccacttcctgatcgagggcgacctgaaccccgacaacagcgacgtggacaagctgttcatccagctggtgcagacctacaaccagctgttcgaggaaaaccccatcaacgccagcggcgtggacgccaaggccatcctgtctgccagactgagcaagagcagacggctggaaaatctgatcgcccagctgcccggcgagaagaagaatggcctgttcggaaacctgattgccctgagcctgggcctgacccccaacttcaagagcaacttcgacctggccgaggatgccaaactgcagctgagcaaggacacctacgacgacgacctggacaacctgctggcccagatcggcgaccagtacgccgacctgtttctggccgccaagaacctgtccgacgccatcctgctgagcgacatcctgagagtgaacaccgagatcaccaaggcccccctgagcgcctctatgatcaagagatacgacgagcaccaccaggacctgaccctgctgaaagctctcgtgcggcagcagctgcctgagaagtacaaagagattttcttcgaccagagcaagaacggctacgccggctacattgacggcggagccagccaggaagagttctacaagttcatcaagcccatcctggaaaagatggacggcaccgaggaactgctcgtgaagctgaacagagaggacctgctgcggaagcagcggaccttcgacaacggcagcatcccccaccagatccacctgggagagctgcacgccattctgcggcggcaggaagatttttacccattcctgaaggacaaccgggaaaagatcgagaagatcctgaccttccgcatcccctactacgtgggccctctggccaggggaaacagcagattcgcctggatgaccagaaagagcgaggaaaccatcaccccctggaacttcgaggaagtggtggacaagggcgcttccgcccagagcttcatcgagcggatgaccaacttcgataagaacctgcccaacgagaaggtgctgcccaagcacagcctgctgtacgagtacttcaccgtgtataacgagctgaccaaagtgaaatacgtgaccgagggaatgagaaagcccgccttcctgagcggcgagcagaaaaaggccatcgtggacctgctgttcaagaccaaccggaaagtgaccgtgaagcagctgaaagaggactacttcaagaaaatcgagtgcttcgactccgtggaaatctccggcgtggaagatcggttcaacgcctccctgggcacataccacgatctgctgaaaattatcaaggacaaggacttcctggacaatgaggaaaacgaggacattctggaagatatcgtgctgaccctgacactgtttgaggacagagagatgatcgaggaacggctgaaaacctatgcccacctgttcgacgacaaagtgatgaagcagctgaagcggcggagatacaccggctggggcaggctgagccggaagctgatcaacggcatccgggacaagcagtccggcaagacaatcctggatttcctgaagtccgacggcttcgccaacagaaacttcatgcagctgatccacgacgacagcctgacctttaaagaggacatccagaaagcccaggtgtccggccagggcgatagcctgcacgagcacattgccaatctggccggcagccccgccattaagaagggcatcctgcagacagtgaaggtggtggacgagctcgtgaaagtgatgggccggcacaagcccgagaacatcgtgatcgaaatggccagagagaaccagaccacccagaagggacagaagaacagccgcgagagaatgaagcggatcgaagagggcatcaaagagctgggcagccagatcctgaaagaacaccccgtggaaaacacccagctgcagaacgagaagctgtacctgtactacctgcagaatgggcgggatatgtacgtggaccaggaactggacatcaaccggctgtccgactacgatgtggaccatatcgtgcctcagagctttctgaaggacgactccatcgacaacaaggtgctgaccagaagcgacaagaaccggggcaagagcgacaacgtgccctccgaagaggtcgtgaagaagatgaagaactactggcggcagctgctgaacgccaagctgattacccagagaaagttcgacaatctgaccaaggccgagagaggcggcctgagcgaactggataaggccggcttcatcaagagacagctggtggaaacccggcagatcacaaagcacgtggcacagatcctggactcccggatgaacactaagtacgacgagaatgacaagctgatccgggaagtgaaagtgatcaccctgaagtccaagctggtgtccgatttccggaaggatttccagttttacaaagtgcgcgagatcaacaactaccaccacgcccacgacgcctacctgaacgccgtcgtgggaaccgccctgatcaaaaagtaccctaagctggaaagcgagttcgtgtacggcgactacaaggtgtacgacgtgcggaagatgatcgccaagagcgagcaggaaatcggcaaggctaccgccaagtacttcttctacagcaacatcatgaactttttcaagaccgagattaccctggccaacggcgagatccggaagcggcctctgatcgagacaaacggcgaaaccggggagatcgtgtgggataagggccgggattttgccaccgtgcggaaagtgctgagcatgccccaagtgaatatcgtgaaaaagaccgaggtgcagacaggcggcttcagcaaagagtctatcctgcccaagaggaacagcgataagctgatcgccagaaagaaggactgggaccctaagaagtacggcggcttcgacagccccaccgtggcctattctgtgctggtggtggccaaagtggaaaagggcaagtccaagaaactgaagagtgtgaaagagctgctggggatcaccatcatggaaagaagcagcttcgagaagaatcccatcgactttctggaagccaagggctacaaagaagtgaaaaaggacctgatcatcaagctgcctaagtactccctgttcgagctggaaaacggccggaagagaatgctggcctctgccggcgaactgcagaagggaaacgaactggccctgccctccaaatatgtgaacttcctgtacctggccagccactatgagaagctgaagggctcccccgaggataatgagcagaaacagctgtttgtggaacagcacaagcactacctggacgagatcatcgagcagatcagcgagttctccaagagagtgatcctggccgacgctaatctggacaaagtgctgtccgcctacaacaagcaccgggataagcccatcagagagcaggccgagaatatcatccacctgtttaccctgaccaatctgggagcccctgccgccttcaagtactttgacaccaccatcgaccggaagaggtacaccagcaccaaagaggtgctggacgccaccctgatccaccagagcatcaccggcctgtacgagacacggatcgacctgtctcagctgggaggtgacaccaatctgagcgacatcatcgagaaagagacaggcaagcagctggtcatccaagagtccatcctgatgctgcctgaagaggtggaagaagtgatcggcaacaagcccgagtccgacatcctggtgcacaccgcctacgatgagagcaccgacgagaacgtgatgctgctgacctctgacgcccctgagtacaagccttgggctctcgtgatccaggacagcaacggcgagaacaagatcaagatgctgagcggcggctctggtggctctggcggatctacaaacctgtccgatattattgagaaagaaaccgggaaacagctcgtgattcaagagtctattctcatgctcccggaagaagtcgaggaagtcattggaaacaagcctgagagcgatattctggtccatacagcctacgacgagtctaccgatgagaatgtcatgctcctcaccagcgacgctcccgagtataagccatgggcacttgtcattcaggactccaatggggaaaacaaaatcaaaatgctcccaaagaaaaaacgcaaggtggagggagctgataagcgcaccgccgatggttccgagttcgaaagccccaagaagaagaggaaagtctaacc

SEQ ID NO: 445 - protein, 1814 aa, Petromyzon marinus
MAGDENVRVSEKLDFDTFEFQFENLHYATERHRTYVIFDVKPQSAGGRSRRLWGYIINNPNVCHAELILMSMIDRHLESNPGVYAMTWYMSWSPCANCSSKLNPWLKNLLEEQGHTLMMHFSRIYDRDREGDHRGLRGLKHVSNSFRMGVVGRAEVKECLAEYVEASRRTLTWLDTTESMAAKMRRKLFCILVRCAGMRESGMPLHLFTLKSGGSSGGSSGSETPGTSESATPESSGGSSGGSDKKYSIGLAIGTNSVGWAVITDEYKVPSKKFKVLGNTDRHSIKKNLIGALLFDSGETAEATRLKRTARRRYTRRKNRICYLQEIFSNEMAKVDDSFFHRLEESFLVEEDKKHERHPIFGNIVDEVAYHEKYPTIYHLRKKLVDSTDKADLRLIYLALAHMIKFRGHFLIEGDLNPDNSDVDKLFIQLVQTYNQLFEENPINASGVDAKAILSARLSKSRRLENLIAQLPGEKKNGLFGNLIALSLGLTPNFKSNFDLAEDAKLQLSKDTYDDDLDNLLAQIGDQYADLFLAAKNLSDAILLSDILRVNTEITKAPLSASMIKRYDEHHQDLTLLKALVRQQLPEKYKEIFFDQSKNGYAGYIDGGASQEEFYKFIKPILEKMDGTEELLVKLNREDLLRKQRTFDNGSIPHQIHLGELHAILRRQEDFYPFLKDNREKIEKILTFRIPYYVGPLARGNSRFAWMTRKSEETITPWNFEEVVDKGASAQSFIERMTNFDKNLPNEKVLPKHSLLYEYFTVYNELTKVKYVTEGMRKPAFLSGEQKKAIVDLLFKTNRKVTVKQLKEDYFKKIECFDSVEISGVEDRFNASLGTYHDLLKIIKDKDFLDNEENEDILEDIVLTLTLFEDREMIEERLKTYAHLFDDKVMKQLKRRRYTGWGRLSRKLINGIRDKQSGKTILDFLKSDGFANRNFMQLIHDDSLTFKEDIQKAQVSGQGDSLHEHIANLAGSPAIKKGILQTVKVVDELVKVMGRHKPENIVIEMARENQTTQKGQKNSRERMKRIEEGIKELGSQILKEHPVENTQLQNEKLYLYYLQNGRDMYVDQELDINRLSDYDVDHIVPQSFLKDDSIDNKVLTRSDKNRGKSDNVPSEEVVKKMKNYWRQLLNAKLITQRKFDNLTKAERGGLSELDKAGFIKRQLVETRQITKHVAQILDSRMNTKYDENDKLIREVKVITLKSKLVSDFRKDFQFYKVREINNYHHAHDAYLNAVVGTALIKKYPKLESEFVYGDYKVYDVRKMIAKSEQEIGKATAKYFFYSNIMNFFKTEITLANGEIRKRPLIETNGETGEIVWDKGRDFATVRKVLSMPQVNIVKKTEVQTGGFSKESILPKRNSDKLIARKKDWDPKKYGGFDSPTVAYSVLVVAKVEKGKSKKLKSVKELLGITIMERSSFEKNPIDFLEAKGYKEVKKDLIIKLPKYSLFELENGRKRMLASAGELQKGNELALPSKYVNFLYLASHYEKLKGSPEDNEQKQLFVEQHKHYLDEIIEQISEFSKRVILADANLDKVLSAYNKHRDKPIREQAENIIHLFTLTNLGAPAAFKYFDTTIDRKRYTSTKEVLDATLIHQSITGLYETRIDLSQLGGDTNLSDIIEKETGKQLVIQESILMLPEEVEEVIGNKPESDILVHTAYDESTDENVMLLTSDAPEYKPWALVIQDSNGENKIKMLSGGSGGSGGSTNLSDIIEKETGKQLVIQESILMLPEEVEEVIGNKPESDILVHTAYDESTDENVMLLTSDAPEYKPWALVIQDSNGENKIKMLPKKKRKVEGADKRTADGSEFESPKKKRK

SEQ ID NO: 446 - DNA, 6176 bp, Artificial Sequence
  Description of Artificial Sequence: Synthetic polynucleotide
ttgattattgactagttattaatagtaatcaattacggggtcattagttcatagcccatatatggagttccgcgttacataacttacggtaaatggcccgcctggctgaccgcccaacgacccccgcccattgacgtcaataatgacgtatgttcccatagtaacgccaatagggactttccattgacgtcaatgggtggagtatttacggtaaactgcccacttggcagtacatcaagtgtatcatatgccaagtacgccccctattgacgtcaatgacggtaaatggcccgcctggcattatgcccagtacatgaccttatgggactttcctacttggcagtacatctacgtattagtcatcgctattaccatggtgatgcggttttggcagtacatcaatgggcgtggatagcggtttgactcacggggatttccaagtctccaccccattgacgtcaatgggagtttgttttggcaccaaaatcaacgggactttccaaaatgtcgtaacaactccgccccattgacgcaaatgggcggtaggcgtgtacggtgggaggtctatataagcagagctggtttagtgaaccgtcagatccgctagagatccgcggccgctaatacgactcactatagggagagccgccaccatgagcagcgagacaggccctgtggctgtggatcctacactgcggagaagaatcgagccccacgagttcgaggtgttcttcgaccccagagagctgcggaaagagacatgcctgctgtacgagatcaactggggcggcagacactctatctggcggcacacaagccagaacaccaacaagcacgtggaagtgaactttatcgagaagtttacgaccgagcggtacttctgccccaacaccagatgcagcatcacctggtttctgagctggtccccttgcggcgagtgcagcagagccatcaccgagtttctgtccagatatccccacgtgaccctgttcatctatatcgcccggctgtaccaccacgccgatcctagaaatagacagggactgcgcgacctgatcagcagcggagtgaccatccagatcatgaccgagcaagagagcggctactgctggcggaacttcgtgaactacagccccagcaacgaagcccactggcctagatatcctcacctgtgggtccgactgtacgtgctggaactgtactgcatcatcctgggcctgcctccatgcctgaacatcctgagaagaaagcagcctcagctgaccttcttcacaatcgccctgcagagctgccactaccagagactgcctccacacatcctgtgggccaccggacttaagagcggaggatctagcggcggctctagcggatctgagacacctggcacaagcgagtctgccacacctgagagtagcggcggatcttctggcggctccgacaagaagtactctatcggactggccatcggcaccaactctgttggatgggccgtgatcaccgacgagtacaaggtgcccagcaagaaattcaaggtgctgggcaacaccgaccggcacagcatcaagaagaatctgatcggcgccctgctgttcgactctggcgaaacagccgaagccaccagactgaagagaaccgccaggcggagatacacccggcggaagaaccggatctgctacctgcaagagatcttcagcaacgagatggccaaggtggacgacagcttcttccacagactggaagagtccttcctggtggaagaggacaagaagcacgagcggcaccccatcttcggcaacatcgtggatgaggtggcctaccacgagaagtaccccaccatctaccacctgagaaagaaactggtggacagcaccgacaaggccgacctgagactgatctacctggctctggcccacatgatcaagttccggggccactttctgatcgagggcgatctgaaccccgacaacagcgacgtggacaagctgttcatccagctggtgcagacctacaaccagctgttcgaggaaaaccccatcaacgcctctggcgtggacgccaaggctatcctgtctgccagactgagcaagagcagaaggctggaaaacctgatcgcccagctgcctggcgagaagaagaatggcctgttcggcaacctgattgccctgagcctgggactgacccctaacttcaagagcaacttcgacctggccgaggatgccaaactgcagctgagcaaggacacctacgacgacgacctggacaatctgctggcccagatcggcgatcagtacgccgacttgtttctggccgccaagaacctgtccgacgccatcctgctgagcgatatcctgagagtgaacaccgagatcacaaaggcccctctgagcgcctctatgatcaagagatacgacgagcaccaccaggatctgaccctgctgaaggccctcgttagacagcagctgccagagaagtacaaagagattttcttcgatcagtccaagaacggctacgccggctacattgatggcggagccagccaagaggaattctacaagttcatcaagcccatcctggaaaagatggacggcaccgaggaactgctggtcaagctgaacagagaggacctgctgcggaagcagcggaccttcgacaatggctctatccctcaccagatccacctgggagagctgcacgccattctgcggagacaagaggacttttacccattcctgaaggacaaccgggaaaagatcgagaagatcctgaccttcaggatcccctactacgtgggaccactggccagaggcaatagcagattcgcctggatgaccagaaagagcgaggaaaccatcacaccctggaacttcgaggaagtggtggacaagggcgccagcgctcagtccttcatcgagcggatgaccaacttcgataagaacctgcctaacgagaaggtgctgcccaagcactccctgctgtatgagtacttcaccgtgtacaacgagctgaccaaagtgaaatacgtgaccgagggaatgagaaagcccgcctttctgagcggcgagcagaaaaaggccattgtggatctgctgttcaagaccaaccggaaagtgaccgtgaagcagctgaaagaggactacttcaagaaaatcgagtgcttcgacagcgtggaaatcagcggcgtggaagatcggttcaatgccagcctgggcacataccacgacctgctgaaaattatcaaggacaaggacttcctggacaacgaagagaacgaggacattctcgaggacatcgtgctgaccctgacactgtttgaggacagagagatgatcgaggaacggctgaaaacatacgcccacctgttcgacgacaaagtgatgaagcaactgaagcggaggcggtacacaggctggggcagactgtctcggaagctgatcaacggcatccgggataagcagtccggcaagacaatcctggatttcctgaagtccgacggcttcgccaacagaaacttcatgcagctgatccacgacgacagcctgacctttaaagaggacatccagaaagcccaggtgtccggccaaggcgattctctgcacgagcacattgccaacctggccggatctcccgccattaagaagggcatcctgcagacagtgaaggtggtggacgagcttgtgaaagtgatgggcagacacaagcccgagaacatcgtgatcgaaatggccagagagaaccagaccacacagaagggccagaagaacagccgcgagagaatgaagcggatcgaagagggcatcaaagagctgggcagccagatcctgaaagaacaccccgtggaaaacacccagctgcagaacgagaagctgtacctgtactacctgcagaatggacgggatatgtacgtggaccaagagctggacatcaaccggctgagcgactacgatgtggaccatatcgtgccccagagctttctgaaggacgactccatcgataacaaggtcctgaccagaagcgacaagaaccggggcaagagcgataacgtgccctccgaagaggtggtcaagaagatgaagaactactggcgacagctgctgaacgccaagctgattacccagcggaagttcgataacctgaccaaggccgagagaggcggcctgagcgaacttgataaggccggcttcattaagcggcagctggtggaaacccggcagatcaccaaacacgtggcacagattctggactcccggatgaacactaagtacgacgagaatgacaagctgatccgggaagtgaaagtcatcaccctgaagtctaagctggtgtccgatttccggaaggatttccagttctacaaagtgcgggaaatcaacaactaccatcacgcccacgacgcctacctgaatgccgttgttggaacagccctgatcaagaagtatcccaagctggaaagcgagttcgtgtacggcgactacaaggtgtacgacgtgcggaagatgatcgccaagagcgaacaagagatcggcaaggctaccgccaagtactttttctacagcaacatcatgaactttttcaagacagagatcaccctggccaacggcgagatccggaaaagacccctgatcgagacaaacggcgaaaccggggagatcgtgtgggataagggcagagattttgccacagtgcggaaagtgctgagcatgccccaagtgaatatcgtgaagaaaaccgaggtgcagacaggcggcttcagcaaagagtctatcctgcctaagcggaacagcgataagctgatcgccagaaagaaggactgggaccctaagaagtacggcggcttcgatagccctaccgtggcctattctgtgctggtggtggccaaagtggaaaagggcaagtccaaaaagctcaagagcgtgaaagagctgctggggatcaccatcatggaaagaagcagctttgagaagaacccgatcgactttctggaagccaagggctacaaagaagtcaagaaggacctcatcatcaagctccccaagtacagcctgttcgagctggaaaatggccggaagcggatgctggcctcagcaggcgaactgcagaaaggcaatgaactggccctgcctagcaaatacgtcaacttcctgtacctggccagccactatgagaagctgaagggcagccccgaggacaatgagcaaaagcagctgtttgtggaacagcacaagcactacctggacgagatcatcgagcagatcagcgagttctccaagagagtgatcctggccgacgctaacctggataaggtgctgtctgcctataacaagcaccgggacaagcctatcagagagcaggccgagaatatcatccacctgtttaccctgaccaacctgggagcccctgccgccttcaagtacttcgacaccaccatcgaccggaagaggtacaccagcaccaaagaggtgctggacgccacactgatccaccagtctatcaccggcctgtacgaaacccggatcgacctgtctcagctcggcggcgattctggtggttctggcggaagtggcggatccaccaatctgagcgacatcatcgaaaaagagacaggcaagcagctcgtgatccaagaatccatcctgatgctgcctgaagaggttgaggaagtgatcggcaacaagcctgagtccgacatcctggtgcacaccgcctacgatgagagcaccgatgagaacgtcatgctgctgacaagcgacgcccctgagtacaagccttgggctctcgtgattcaggacagcaatggggagaacaagatcaagatgctgagcggaggtagcggaggcagtggcggaagcacaaacctgtctgatatcattgaaaaagaaaccgggaagcaactggtcattcaagagtccattctcatgctcccggaagaagtcgaggaagtcattggaaacaaacccgagagcgatattctggtccacacagcctatgacgagtctacagacgaaaacgtgatgctcctgacctctgacgctcccgagtataagccctgggcacttgttatccaggactctaacggggaaaacaaaatcaaaatgttgtccggcggcagcaagcggacagccgatggatctgagttcgagagccccaagaagaaacggaaggtggagtgaccggtcatc

SEQ ID NO: 447 - protein, 1835 aa, Rattus norvegicus
MSSETGPVAVDPTLRRRIEPHEFEVFFDPRELRKETCLLYEINWGGRHSIWRHTSQNTNKHVEVNFIEKFTTERYFCPNTRCSITWFLSWSPCGECSRAITEFLSRYPHVTLFIYIARLYHHADPRNRQGLRDLISSGVTIQIMTEQESGYCWRNFVNYSPSNEAHWPRYPHLWVRLYVLELYCIILGLPPCLNILRRKQPQLTFFTIALQSCHYQRLPPHILWATGLKSGGSSGGSSGSETPGTSESATPESSGGSSGGSDKKYSIGLAIGTNSVGWAVITDEYKVPSKKFKVLGNTDRHSIKKNLIGALLFDSGETAEATRLKRTARRRYTRRKNRICYLQEIFSNEMAKVDDSFFHRLEESFLVEEDKKHERHPIFGNIVDEVAYHEKYPTIYHLRKKLVDSTDKADLRLIYLALAHMIKFRGHFLIEGDLNPDNSDVDKLFIQLVQTYNQLFEENPINASGVDAKAILSARLSKSRRLENLIAQLPGEKKNGLFGNLIALSLGLTPNFKSNFDLAEDAKLQLSKDTYDDDLDNLLAQIGDQYADLFLAAKNLSDAILLSDILRVNTEITKAPLSASMIKRYDEHHQDLTLLKALVRQQLPEKYKEIFFDQSKNGYAGYIDGGASQEEFYKFIKPILEKMDGTEELLVKLNREDLLRKQRTFDNGSIPHQIHLGELHAILRRQEDFYPFLKDNREKIEKILTFRIPYYVGPLARGNSRFAWMTRKSEETITPWNFEEVVDKGASAQSFIERMTNFDKNLPNEKVLPKHSLLYEYFTVYNELTKVKYVTEGMRKPAFLSGEQKKAIVDLLFKTNRKVTVKQLKEDYFKKIECFDSVEISGVEDRFNASLGTYHDLLKIIKDKDFLDNEENEDILEDIVLTLTLFEDREMIEERLKTYAHLFDDKVMKQLKRRRYTGWGRLSRKLINGIRDKQSGKTILDFLKSDGFANRNFMQLIHDDSLTFKEDIQKAQVSGQGDSLHEHIANLAGSPAIKKGILQTVKVVDELVKVMGRHKPENIVIEMARENQTTQKGQKNSRERMKRIEEGIKELGSQILKEHPVENTQLQNEKLYLYYLQNGRDMYVDQELDINRLSDYDVDHIVPQSFLKDDSIDNKVLTRSDKNRGKSDNVPSEEVVKKMKNYWRQLLNAKLITQRKFDNLTKAERGGLSELDKAGFIKRQLVETRQITKHVAQILDSRMNTKYDENDKLIREVKVITLKSKLVSDFRKDFQFYKVREINNYHHAHDAYLNAVVGTALIKKYPKLESEFVYGDYKVYDVRKMIAKSEQEIGKATAKYFFYSNIMNFFKTEITLANGEIRKRPLIETNGETGEIVWDKGRDFATVRKVLSMPQVNIVKKTEVQTGGFSKESILPKRNSDKLIARKKDWDPKKYGGFDSPTVAYSVLVVAKVEKGKSKKLKSVKELLGITIMERSSFEKNPIDFLEAKGYKEVKKDLIIKLPKYSLFELENGRKRMLASAGELQKGNELALPSKYVNFLYLASHYEKLKGSPEDNEQKQLFVEQHKHYLDEIIEQISEFSKRVILADANLDKVLSAYNKHRDKPIREQAENIIHLFTLTNLGAPAAFKYFDTTIDRKRYTSTKEVLDATLIHQSITGLYETRIDLSQLGGDSGGSGGSGGSTNLSDIIEKETGKQLVIQESILMLPEEVEEVIGNKPESDILVHTAYDESTDENVMLLTSDAPEYKPWALVIQDSNGENKIKMLSGGSGGSGGSTNLSDIIEKETGKQLVIQESILMLPEEVEEVIGNKPESDILVHTAYDESTDENVMLLTSDAPEYKPWALVIQDSNGENKIKMLSGGSKRTADGSEFESPKKKRK

SEQ ID NO: 448 - DNA, 20 bp, Homo sapiens
agtgcagttagggctgggaa

SEQ ID NO: 449 - DNA, 246 bp, Artificial Sequence
  Description of Artificial Sequence: Synthetic polynucleotide
tacgtgacgtagaaagtaataatttcttgggtagtttgcagttttaaaattatgttttaaaatggactatcatatgcttaccgtaacttgaaagtatttcgatttcttggctttatatatcttgtggaaaggacgaaacaccgacttaccgcatgtccccgtagttttagagctagaaatagcaagttaaaataaggctagtccgttatcaacttgaaaaagtggcaccgagtcggtgcttttttt

SEQ ID NO: 450 - DNA, 246 bp, Artificial Sequence
  Description of Artificial Sequence: Synthetic polynucleotide
tacgtgacgtagaaagtaataatttcttgggtagtttgcagttttaaaattatgttttaaaatggactatcatatgcttaccgtaacttgaaagtatttcgatttcttggctttatatatcttgtggaaaggacgaaacaccgagtgcagttagggctgggaagttttagagctagaaatagcaagttaaaataaggctagtccgttatcaacttgaaaaagtggcaccgagtcggtgcttttttt

SEQ ID NO: 451 - DNA, 246 bp, Artificial Sequence
  Description of Artificial Sequence: Synthetic polynucleotide
tacgtgacgtagaaagtaataatttcttgggtagtttgcagttttaaaattatgttttaaaatggactatcatatgcttaccgtaacttgaaagtatttcgatttcttggctttatatatcttgtggaaaggacgaaacaccgaagtgcagttagggctgggagttttagagctagaaatagcaagttaaaataaggctagtccgttatcaacttgaaaaagtggcaccgagtcggtgcttttttt

SEQ ID NO: 452 - DNA, 245 bp, Artificial Sequence
  Description of Artificial Sequence: Synthetic polynucleotide
tacgtgacgtagaaagtaataatttcttgggtagtttgcagttttaaaattatgttttaaaatggactatcatatgcttaccgtaacttgaaagtatttcgatttcttggctttatatatcttgtggaaaggacgaaacaccgacctaccgaggagctttccgttttagagctagaaatagcaagttaaaataaggctagtccgttatcaacttgaaaaagtggcaccgagtcggtgcttttttt

SEQ ID NO: 453 - DNA, 245 bp, Artificial Sequence
  Description of Artificial Sequence: Synthetic polynucleotide
tacgtgacgtagaaagtaataatttcttgggtagtttgcagttttaaaattatgttttaaaatggactatcatatgcttaccgtaacttgaaagtatttcgatttcttggctttatatatcttgtggaaaggacgaaacaccgttccagagcgtgcgcgaaggttttagagctagaaatagcaagttaaaataaggctagtccgttatcaacttgaaaaagtggcaccgagtcggtgcttttttt

SEQ ID NO: 454 - DNA, 246 bp, Artificial Sequence
  Description of Artificial Sequence: Synthetic polynucleotide
tacgtgacgtagaaagtaataatttcttgggtagtttgcagttttaaaattatgttttaaaatggactatcatatgcttaccgtaacttgaaagtatttcgatttcttggctttatatatcttgtggaaaggacgaaacaccgtttccagtttggagactgccgttttagagctagaaatagcaagttaaaataaggctagtccgttatcaacttgaaaaagtggcaccgagtcggtgcttttttt

SEQ ID NO: 455 - DNA, 246 bp, Artificial Sequence
  Description of Artificial Sequence: Synthetic polynucleotide
tacgtgacgtagaaagtaataatttcttgggtagtttgcagttttaaaattatgttttaaaatggactatcatatgcttaccgtaacttgaaagtatttcgatttcttggctttatatatcttgtggaaaggacgaaacaccgttccagtttggagactgccagttttagagctagaaatagcaagttaaaataaggctagtccgttatcaacttgaaaaagtggcaccgagtcggtgcttttttt

SEQ ID NO: 456 - DNA, 246 bp, Artificial Sequence
  Description of Artificial Sequence: Synthetic polynucleotide
tacgtgacgtagaaagtaataatttcttgggtagtttgcagttttaaaattatgttttaaaatggactatcatatgcttaccgtaacttgaaagtatttcgatttcttggctttatatatcttgtggaaaggacgaaacaccgtccaccccagaagacctgccgttttagagctagaaatagcaagttaaaataaggctagtccgttatcaacttgaaaaagtggcaccgagtcggtgcttttttt

SEQ ID NO: 457 - DNA, 23 bp, Homo sapiens
acttaccgcatgtccccgtaagg

SEQ ID NO: 458 - DNA, 23 bp, Homo sapiens
agtgcagttagggctgggaaggg

SEQ ID NO: 459 - DNA, 23 bp, Homo sapiens
aagtgcagttagggctgggaagg

SEQ ID NO: 460 - DNA, 23 bp, Homo sapiens
gacctaccgaggagctttccaga

SEQ ID NO: 461 - DNA, 23 bp, Homo sapiens
gttccagagcgtgcgcgaagtga

SEQ ID NO: 462 - DNA, 23 bp, Homo sapiens
tttccagtttggagactgccagg

SEQ ID NO: 463 - DNA, 23 bp, Homo sapiens
ttccagtttggagactgccaggg

SEQ ID NO: 464 - DNA, 20 bp, Homo sapiens
acttaccgcatgtccccgta

SEQ ID NO: 465 - DNA, 20 bp, Homo sapiens
aagtgcagttagggctggga

SEQ ID NO: 466 - DNA, 20 bp, Homo sapiens
gacctaccgaggagctttcc

SEQ ID NO: 467 - DNA, 20 bp, Homo sapiens
gttccagagcgtgcgcgaag

SEQ ID NO: 468 - DNA, 20 bp, Homo sapiens
tttccagtttggagactgcc

SEQ ID NO: 469 - DNA, 20 bp, Homo sapiens
ttccagtttggagactgcca

SEQ ID NO: 470 - DNA, 20 bp, Homo sapiens
tccaccccagaagacctgcc

SEQ ID NO: 471 - DNA, 13 bp, Homo sapiens
ttgaccaatagcc

SEQ ID NO: 472 - DNA, 67 bp, Homo sapiens
tggctaaactccacccatgggttggccagccttgccttgaccaatagccttgacaaggcaaacttga

SEQ ID NO: 473 - protein, 8 aa, Artificial Sequence
  Description of Artificial Sequence: Synthetic peptide
  MOD_RES (5)..(5): Val or Ala
  MOD_RES (8)..(8): Ser or Pro
HLTPXEKX

SEQ ID NO: 474 - DNA, 25 bp, Artificial Sequence
  Description of Artificial Sequence: Synthetic oligonucleotide
gcatctgactcctgtggagaagtct

SEQ ID NO: 475 - DNA, 25 bp, Artificial Sequence
  Description of Artificial Sequence: Synthetic oligonucleotide
agacttctccacaggagtcagatgc

SEQ ID NO: 476 - protein, 8 aa, Artificial Sequence
  Description of Artificial Sequence: Synthetic peptide
HLTPVEKS

SEQ ID NO: 477 - DNA, 20 bp, Artificial Sequence
  Description of Artificial Sequence: Synthetic oligonucleotide
gaacacaaagcatagactgc

SEQ ID NO: 478 - DNA, 20 bp, Artificial Sequence
  Description of Artificial Sequence: Synthetic oligonucleotide
gggaaagacccagcatccgt

SEQ ID NO: 479 - DNA, 20 bp, Artificial Sequence
  Description of Artificial Sequence: Synthetic oligonucleotide
gctcccatcacatcaaccgg

SEQ ID NO: 480 - DNA, 20 bp, Artificial Sequence
  Description of Artificial Sequence: Synthetic oligonucleotide
ggcttcaggttctaaatgag

SEQ ID NO: 481 - DNA, 20 bp, Artificial Sequence
  Description of Artificial Sequence: Synthetic oligonucleotide
gcagagagtcgccgtctcca

SEQ ID NO: 482 - DNA, 20 bp, Artificial Sequence
  Description of Artificial Sequence: Synthetic oligonucleotide
gtgtaagacctcaaaagcac

SEQ ID NO: 483 - DNA, 23 bp, Homo sapiens
gtggggaaggggcccccaagagg

SEQ ID NO: 484 - DNA, 28 bp, Homo sapiens
ttataaataggctgtaccagtgcaggtc

SEQ ID NO: 485 - protein, 6 aa, Homo sapiens
GCTSAG

SEQ ID NO: 486 - DNA, 18 bp, Homo sapiens
gacctgcactggtacagc

SEQ ID NO: 487 - DNA, 38 bp, Homo sapiens
ttcttcttcttataaataggctgtaccagtgcaggtcc

SEQ ID NO: 488 - protein, 7 aa, Homo sapiens
GCTSAGP

SEQ ID NO: 489 - DNA, 35 bp, Homo sapiens
gatgctttttcattattaggcatgttggagacttg

SEQ ID NO: 490 - protein, 5 aa, Homo sapiens
HVGDL

SEQ ID NO: 491 - DNA, 31 bp, Homo sapiens
ggatggaagtgcagttagggctgggaagggt

SEQ ID NO: 492 - protein, 10 aa, Homo sapiens
MEVQLGLGRV

SEQ ID NO: 493 - DNA, 33 bp, Homo sapiens
tccggaccttacggggacatgcggtaagttttt

SEQ ID NO: 494 - protein, 8 aa, Homo sapiens
SGPYGDMR

SEQ ID NO: 495 - DNA, 43 bp, Homo sapiens
ctcaaggatggaagtgcagttagggctgggaagggtctaccct

SEQ ID NO: 496 - protein, 12 aa, Homo sapiens
MEVQLGLGRVYP

SEQ ID NO: 497 - DNA, 14 bp, Homo sapiens
gaggagcttctatt

1. A method of treating a neurological disorder in a subject in need thereof, the method comprising: administering to the subject (i) an adenosine base editor or a nucleic acid sequence encoding the adenosine base editor and (ii) a guide polynucleotide or a nucleic acid sequence encoding the guide polynucleotide, wherein the adenosine base editor comprises a programmable DNA binding domain and an adenosine deaminase domain,
and wherein the guide polynucleotide directs the adenosine base editor to effect a single nucleobase modification at a splice site of a target gene associated with the neurological disorder in the subject, thereby treating the neurological disorder in the subject.

2. The method of claim 1, wherein the adenosine deaminase comprises an amino acid substitution at amino acid position 82 or 166 as numbered in SEQ ID NO: 2 or a corresponding substitution thereof.

3. The method of claim 1, wherein the single nucleobase modification results in alternative splicing of a transcript encoded by the target gene.

4. The method of claim 1, wherein the alternative splicing generates a truncated or nonfunctional protein encoded by the target gene.

5. The method of claim 1, wherein the single nucleobase modification results in reduced expression of the target gene in the subject.

6. The method claim 1, wherein the target gene is a superoxide dismutase 1 (SOD1) gene and wherein the neurological disease is Amyotrophic Lateral Sclerosis (ALS).

7. A method of treating Amyotrophic Lateral Sclerosis (ALS) in a subject in need thereof, the method comprising: administering to the subject (i) a base editor or a nucleic acid sequence encoding the base editor and (ii) a guide polynucleotide or a nucleic acid sequence encoding the guide polynucleotide,
wherein the base editor comprises a programmable DNA binding domain and a deaminase domain, and wherein the guide polynucleotide directs the adenosine base editor to effect a single nucleobase modification at a splice site of a superoxide dismutase 1 (SOD1) gene in the subject, thereby treating ALS in the subject.

8. Tag method of claim 1,
wherein the single nucleobase modification results in a premature stop codon in the SOD1 gene, thereby treating ALS in the subject.

9. The method of claim 7, wherein the deaminase is an adenosine deaminase comprising an amino acid substitution at amino acid position 82 or 166 as numbered in SEQ ID NO: 2 or a corresponding substitution thereof.

10. (canceled)

11. The method of claim 7, wherein the single nucleobase modification is at a splice acceptor site of the SOD1 gene.

12. (canceled)

13-19. (canceled)

20. The method of claim 1, wherein the guide polynucleotide comprises a nucleic acid sequence selected from the group consisting of 5′-UUAAAGGAAAGUAAUGGACCAGU-3′, 5′-UAAAUAGGCUGUACCAGUGCAGG-3′, 5′-UUCAUUAUUAGGCAUGUUGGAGA-3′, 5′-AAAUAGGCUGUACCAGUGCAGGU-3′, 5′-UAUUAGGCAUGUUGGAGACUUGG-3′.

21. The method of claim 1, wherein the target gene is an androgen receptor (AR) gene and wherein the neurological disease is spinal and bulbar muscular atrophy (SBMA).

22. A method of treating spinal and bulbar muscular atrophy (SBMA) in a subject, the method comprising: administering to the subject (i) a base editor or a nucleic acid sequence encoding the base editor and (ii) a guide polynucleotide or a nucleic acid sequence encoding the guide polynucleotide,
wherein the base editor comprises a programmable DNA binding domain and a deaminase domain, and wherein the guide polynucleotide directs the adenosine base editor to effect a single nucleobase modification at a splice site of an androgen receptor (AR) gene in the subject, thereby treating SBMA in the subject.

23. The method of claim 22, wherein the single nucleobase modification results in a premature stop codon in the AR gene, thereby treating SBMA in the subject.

24-25. (canceled)

26. The method of claim 22, wherein the deaminase is an adenosine deaminase comprising an amino acid substitution at amino acid position 82 or 166 as numbered in SEQ ID NO: 2.

27-39. (canceled)

40. A method of modifying a target gene or a regulatory element thereof associated with a neurological disorder, the method comprising: contacting the target gene or regulatory element thereof with (i) an adenosine base editor or a nucleic acid sequence encoding the adenosine base editor and (ii) a guide polynucleotide or a nucleic acid sequence encoding the guide polynucleotide, wherein the adenosine base editor comprises a programmable DNA binding domain and an adenosine deaminase domain, wherein the guide polynucleotide directs the adenosine base editor to effect a single nucleobase alteration at a splice site of the target gene.

41. The method of claim 40, wherein the adenosine deaminase comprises an amino acid substitution at amino acid position 82 or 166 as numbered in SEQ ID NO: 2.

42. The method of claim 40, wherein the single nucleobase alteration results in alternative splicing of a transcript encoded by the target gene, a truncated and/or nonfunctional protein encoded by the target gene, and/or reduced expression of the target gene when expressed in a cell.

43. The method of claim 40, wherein the target gene is a superoxide dismutase 1 (SOD1) gene and wherein the neurological disease is Amyotrophic Lateral Sclerosis (ALS).

44. A method of modulating expression of a superoxide dismutase (SOD1) gene, the method comprising: contacting a SOD1 gene or a regulatory element thereof with (i) a base editor or a nucleic acid sequence encoding the base editor and (ii) a guide polynucleotide or a nucleic acid sequence encoding the guide polynucleotide,
wherein the base editor comprises a programmable DNA binding domain and a deaminase domain, and wherein the guide polynucleotide directs the adenosine base editor to effect a single nucleobase alteration at a splice site of a superoxide dismutase 1 (SOD1) gene.

45. The method of claim 44, wherein the single nucleobase alteration results in a premature stop codon in the SOD1 gene.

46-56. (canceled)

57. A method of modulating expression of an androgen receptor (AR) gene, the method comprising: contacting the AR gene or a regulatory element thereof with (i) a base editor or a nucleic acid sequence encoding the base editor and (ii) a guide polynucleotide or a nucleic acid sequence encoding the guide polynucleotide,
wherein the base editor comprises a programmable DNA binding domain and a deaminase domain, and wherein the guide polynucleotide directs the adenosine base editor to effect a single nucleobase alteration at a splice site of a androgen receptor (AR) gene.

58. The method of claim 57 wherein the single nucleobase alteration results in a premature stop codon in the AR gene.

59. The method of claim 57, wherein the deaminase is an adenosine deaminase comprising an amino acid substitution at amino acid position 82 or 166 as numbered in SEQ ID NO: 2.

60-90. (canceled)

91. The method of claim 57, wherein the adenosine deaminase comprises a V28S mutation or a T166R mutation as numbered in SEQ ID NO: 2 or a corresponding mutation thereof.

92-104. (canceled)

105. A base editor system that comprises (i) a base editor or a nucleic acid sequence encoding the base editor and (ii) a guide polynucleotide or a nucleic acid sequence encoding the guide polynucleotide,
wherein the base editor comprises a programmable DNA binding domain and a deaminase domain, and wherein the guide polynucleotide directs the adenosine base editor to effect a single nucleobase modification at a splice site of a superoxide dismutase 1 (SOD1).

106-118. (canceled)

119. A base editor system that comprises (i) a base editor or a nucleic acid sequence encoding the base editor and (ii) a guide polynucleotide or a nucleic acid sequence encoding the guide polynucleotide,
wherein the base editor comprises a programmable DNA binding domain and a deaminase domain, and wherein the guide polynucleotide directs the adenosine base editor to effect a single nucleobase modification at a splice site of a androgen receptor (AR) gene.

120-136. (canceled)

137. The base editor system of claim 119, wherein the adenosine deaminase comprises a V28S mutation or a T166R mutation as numbered in SEQ ID NO: 2 or a corresponding mutation thereof.

138-149. (canceled)

150. A vector comprising the nucleic acid sequence encoding the polynucleotide programmable DNA binding domain and the nucleic acid sequence encoding the adenosine deaminase domain in the base editor system of claim 119.

151-152. (canceled)

153. A cell comprising the base editor system of claim 119.

154-161. (canceled)

162. A pharmaceutical composition comprising the base editor system of claim 119, and a pharmaceutically acceptable carrier.

163-168. (canceled)
